(19) United States
(12) Patent Application Publication
(10) Pub. No.: US 2023/0212562 A1
(43) Pub. Date: Jul. 6, 2023

(54) DIFFERENTIAL KNOCKOUT OF A HETEROZYGOUS ALLELE OF SAMD9L

(71) Applicant: EmendoBio Inc., Wilmington, DE (US)

(72) Inventors: Rafi Emmanuel, Ramla (IL); Joseph Dicken, Rehovot (IL); Michal Golan Mashiach, Ness Ziona (IL)

(73) Assignee: EmendoBio Inc., Wilmington, DE (US)

(21) Appl. No.: 17/927,663

(22) PCT Filed: May 28, 2021
(86) PCT No.: PCT/US2021/034794

§ 371 Date: Nov. 23, 2022

Related U.S. Application Data
(60) Provisional application No. 63/031,157, filed on May 28, 2020.

(51) Int. Cl. C12N 15/11; C12N 15/113

(52) U.S. Cl. CPC C12N 15/111; C12N 15/1135; C12N 2310/20; C12N 2320/34

(57) ABSTRACT

RNA molecules comprising a guide sequence portion having 17-50 contiguous nucleotides containing nucleotides in the sequence set forth in any one of SEQ ID NOs: 1-20246 and compositions, methods, and uses thereof.

[0001] Throughout this application, various publications are referenced, including referenced in parenthesis. The disclosures of all publications mentioned in this application in their entireties are hereby incorporated by reference into this application in order to provide additional description of the art to which this invention pertains and of the features in the art which can be employed with this invention.

### REFERENCE TO SEQUENCE LISTING

[0002] This application incorporates-by-reference nucleotide sequences which are present in the file named “210528_91406-A-PCT_Sequence_Listing_AWG.txt”, which is 4,452 kilobytes in size, and which was created on May 27, 2021 in the IBM-PC machine format, having an operating system compatibility with MS-Windows, which is contained in the text file filed May 28, 2021 as part of this application.

### BACKGROUND OF INVENTION

[0003] There are several classes of DNA variation in the human genome, including insertions and deletions, differences in the copy number of repeated sequences, and single nucleotide polymorphisms (SNPs). A SNP is a DNA sequence variation occurring when a single nucleotide (adenine (A), thymine (T), cytosine (C), or guanine (G)) in the genome differs between human subjects or paired chromosomes in an individual. Over the years, the different types of DNA variations have been the focus of the research community either as markers in studies to pinpoint traits or disease causation or as potential causes of genetic disorders.

[0004] A genetic disorder is caused by one or more abnormalities in the genome. Genetic disorders may be regarded as either “dominant” or “recessive.” Recessive genetic disorders are those which require two copies (i.e., two alleles) of the abnormal/defective gene to be present. In contrast, a dominant genetic disorder involves a gene or genes which exhibit(s) dominance over a normal (functional/healthy) gene or genes. As such, in dominant genetic disorders only a single copy (i.e., allele) of an abnormal gene is required to cause or contribute to the symptoms of a particular genetic disorder. Such mutations include, for example, gain-of-function mutations in which the altered gene product possesses a new molecular function or a new pattern of gene expression. Other examples include dominant negative mutations, which have a gene product that acts antagonistically to the wild-type allele.

[0005] The sterile alpha motif domain containing 9 like (SAMD9L) gene is involved in endosome fusion and mediates down-regulation of growth factor signaling via internalization of a growth factor receptor. Dominant mutations in SAMD9L are associated with ATXPC syndrome, which is characterized by cerebellar ataxia, variable hematologic cytopenias, and predisposition to bone marrow failure and myeloid leukemia (Davidsson et al., 2018 and Phowthongkum et al., 2017).

### SUMMARY OF THE INVENTION

[0006] Disclosed is an approach for knocking out the expression of a dominant-mutated allele by disrupting the dominant-mutated allele or degrading the resulting mRNA.

[0007] The present disclosure provides a method for utilizing at least one naturally occurring nucleotide difference or polymorphism (e.g., single nucleotide polymorphism (SNP)) for distinguishing/discriminating between two alleles of a gene, one allele bearing a mutation such that it encodes a mutated protein causing a disease phenotype (“mutated allele”) and a particular sequence in a SNP position (REF/SNP), and the other allele encoding for a functional protein (“functional allele”). In some embodiments, the SNP position is utilized for distinguishing/discriminating between two alleles of a gene bearing one or more disease associated mutations, such as to target one of the alleles bearing both the particular sequence in the SNP position (SNP/REF) and a disease associated mutation. In some embodiments, the disease-associated mutation is targeted. In some embodiments, the method further comprises the step of knocking out expression of the mutated protein and allowing expression of the functional protein.

[0008] The present disclosure also provides a method for modifying in a cell a mutant allele of the sterile alpha motif domain containing 9 like (SAMD9L) gene having a mutation associated with ATXPC syndrome, the method comprising
[0009] introducing to the cell a composition comprising:
   [0010] a CRISPR nuclease or a sequence encoding the CRISPR nuclease; and
   [0011] a first RNA molecule comprising a guide sequence portion having 17-50 nucleotides or a nucleotide sequence encoding the same,
[0012] wherein a complex of the CRISPR nuclease and the first RNA molecule affects a double strand break in the mutant allele of the SAMD9L gene.

[0013] According to embodiments of the present invention, there is provided a first RNA molecule comprising a guide sequence portion having 17-50 contiguous nucleotides containing nucleotides in the sequence set forth in any one of SEQ ID Nos: 1-20246.

[0014] According to some embodiments of the present invention, there is provided a composition comprising an RNA molecule comprising a guide sequence portion having 17-50 contiguous nucleotides containing nucleotides in the sequence set forth in any one of SEQ ID NOs: 1-20246 and a CRISPR nuclease.

[0015] According to some embodiments of the present invention, there is provided a method for inactivating a mutant SAMD9L allele in a cell, the method comprising delivering to the cell a composition comprising an RNA molecule comprising a guide sequence portion having 17-50 contiguous nucleotides containing nucleotides in the sequence set forth in any one of SEQ ID NOs: 1-20246 and a CRISPR nuclease. In some embodiments, the cell is a stem cell. In some embodiments, the stem cell is a hematopoietic stem/progenitor cell (HSC). In some embodiments, the delivering to the cell is performed in vitro, ex vivo, or in vivo. In some embodiments, the method is performed ex vivo and the cell is provided/explanted from an individual patient. In some embodiments, the method further comprises the step of introducing the resulting cell, with the modified/knocked out mutant SAMD9L allele, into the individual patient (e.g. autologous transplantation).

[0016] According to some embodiments of the present invention, there is provided a method for treating ATXPC syndrome, the method comprising delivering to a cell of a subject having ATXPC syndrome a composition comprising an RNA molecule comprising a guide sequence portion having 17-50 contiguous nucleotides containing nucleotides in the sequence set forth in any one of SEQ ID NOs: 1-20246 and a CRISPR nuclease.

[0017] According to some embodiments of the present invention, there is provided use of a composition comprising an RNA molecule comprising a guide sequence portion having 17-50 contiguous nucleotides containing nucleotides in the sequence set forth in any one of SEQ ID NOs: 1-20246 and a CRISPR nuclease for inactivating a mutant SAMD9L allele in a cell, comprising delivering to the cell the composition comprising an RNA molecule comprising a guide sequence portion having 17-50 contiguous nucleotides containing nucleotides in the sequence set forth in any one of SEQ ID NOs: 1-20246 and a CRISPR nuclease.

[0018] According to embodiments of the present invention, there is provided a medicament comprising an RNA molecule comprising a guide sequence portion having 17-50 contiguous nucleotides containing nucleotides in the sequence set forth in any one of SEQ ID NOs: 1-20246 and a CRISPR nuclease for use in inactivating a mutant SAMD9L allele in a cell, wherein the medicament is administered by delivering to the cell the composition comprising an RNA molecule comprising a guide sequence portion having 17-50 contiguous nucleotides containing nucleotides in the sequence set forth in any one of SEQ ID NOs: 1-20246 and a CRISPR nuclease.

[0019] According to some embodiments of the present invention, there is provided use of a composition comprising an RNA molecule comprising a guide sequence portion having 17-50 contiguous nucleotides containing nucleotides in the sequence set forth in any one of SEQ ID NOs: 1-20246 and a CRISPR nuclease for treating ameliorating or preventing ATXPC syndrome, comprising delivering to a cell of a subject having or at risk of having ATXPC syndrome the composition of comprising an RNA molecule comprising a guide sequence portion having 17-50 contiguous nucleotides containing nucleotides in the sequence set forth in any one of SEQ ID NOs: 1-20246 and a CRISPR nuclease. In some embodiments, the method is performed ex vivo and the cell is provided/explanted from the subject. In some embodiments, the method further comprises the step of introducing the resulting cell, with the modified/knocked out mutant SAMD9L allele, into the subject (e.g. autologous transplantation).

[0020] According to some embodiments of the present invention, there is provided a medicament comprising the composition comprising an RNA molecule comprising a guide sequence portion having 17-50 contiguous nucleotides containing nucleotides in the sequence set forth in any one of SEQ ID NOs: 1-20246 and a CRISPR nuclease for use in treating ameliorating or preventing ATXPC syndrome, wherein the medicament is administered by delivering to a cell of a subject having or at risk of having ATXPC syndrome the composition comprising an RNA molecule comprising a guide sequence portion having 17-50 contiguous nucleotides containing nucleotides in the sequence set forth in any one of SEQ ID NOs: 1-20246 and a CRISPR nuclease.

[0021] According to some embodiments of the present invention, there is provided a kit for inactivating a mutant SAMD9L allele in a cell, comprising an RNA molecule comprising a guide sequence portion having 17-50 contiguous nucleotides containing nucleotides in the sequence set forth in any one of SEQ ID NOs: 1-20246, a CRISPR nuclease, and/or a tracrRNA molecule; and instructions for delivering the RNA molecule; CRISPR nuclease, and/or the tracrRNA to the cell.

[0022] According to some embodiments of the present invention, there is provided a kit for treating ATXPC syndrome in a subject, comprising an RNA molecule comprising a guide sequence portion having 17-50 contiguous nucleotides containing nucleotides in the sequence set forth in any one of SEQ ID NOs: 1-20246, a CRISPR nuclease, and/or a tracrRNA molecule; and instructions for delivering the RNA molecule; CRISPR nuclease, and/or the tracrRNA to a cell of a subject having or at risk of having ATXPC syndrome.

### BRIEF DESCRIPTION OF THE DRAWINGS

[0023] FIG. 1: Guide activity of guide RNA molecules targeting SAMD9L in HeLa cells. Specific RNA guide molecules were co-transfected with SpCas9 to determine their on-target activity. Cells were harvested 72 hours post DNA transfection, genomic DNA was extracted, and the region of the mutation was amplified and then analyzed by NGS. The graph represents the % of editing±standard deviation (STDV) of three independent transfections.

[0024] FIG. 2: Editing activity of novel nucleases guides (OMNIs) targeting SAMD9L in HeLa cells. Specific RNA guide molecules were-co-transfected with each OMNI CRISPR nuclease to determine their on-target activity. Cells were harvested 72 hours post DNA transfection, genomic DNA was extracted, and the region of the mutation was amplified and analyzed by next-generation sequencing (NGS). Transfection efficiency is measured by mCherry fluorescence. The graph represents the % of editing±STDV of three independent transfections.

[0025] FIG. 3: Guide activity of RNA guide molecules targeting SAMD9L in donor-derived HSCs. RNPs complexed with SpCas9 and specific RNA guide molecules were electroporated into HSCs to determine their activity. Cells were harvested 72 hours post RNP electroporation, genomic was DNA extracted, and the region of the mutation was amplified and analyzed by NGS. The graph represents the % of editing±STDV of two independent electroporations. The table below the graph indicates the location of the guide sequence portion of each guide molecule and genotype of HSCs for each of the SNPs.

[0026] FIGS. 4A-4B: Effect of editing on protein levels of SAMD9L in U2OS cells. RNPs complexed with SpCas9 and a RNA guide molecule were electroporated into U2OSs. Cells were harvested six days post RNP electroporation, lysed, and analyzed by western blot (WB) assay (FIG. 4A). Relative protein levels to control (NT1−control) were quantified for each sample (FIG. 4B).

[0027] FIGS. 5A-5D: Knockout strategies utilizing guides targeting SAMD9L—Schematic representation of example SAMD9L editing strategies. The SAMD9L protein-encoding exon is represented as a white box, the UTR regions are represented as dotted boxes, introns are represented as black lines, a nuclease is represented by scissors accompanied by an arrow indicating the target site, a SNP is represented by a black star, a polyadenylation signal is represented by a black triangle, and a template encoding a splice acceptor is represented by a striped box. FIG. 5A: Strategy 1—Creation of a frameshift generated by the use of a single discriminatory guide RNA molecule targeting a SNP within a mutated allele of a SAMD9L coding exon. FIG. 5B: Strategy 2—Excision of the mutated SAMD9L coding exon using a first discriminatory guide RNA molecule and a second non-discriminatory guide RNA molecule. In the depicted schematic, the first discriminatory guide targets a SNP in Intron 4 and the second non-discriminatory guide RNA molecule targets the 3′UTR. In an alternative example of exon excision, the first discriminatory guide targets a SNP in the 3′UTR and the second non-discriminatory guide RNA molecule targets Intron 4. FIG. 5C: Strategy 3—Excision of the polyadenylation signal of a mutated SAMD9L allele using a first discriminatory guide RNA molecule and a second non-discriminatory guide RNA molecule. FIG. 5D: Strategy 4—Introduction of a splice acceptor site upstream of the coding exon of a mutated SAMD9L allele upon targeting a CRISPR nuclease to Intron 4 of the mutated allele using a discriminatory guide RNA molecule.

### DETAILED DESCRIPTION

[0028] Unless otherwise defined, all technical and/or scientific terms used herein have the same meaning as commonly understood by one of ordinary skill in the art to which the invention pertains. Although methods and materials similar or equivalent to those described herein can be used in the practice or testing of embodiments of the invention, exemplary methods and/or materials are described below. In case of conflict, the patent specification, including definitions, will control. In addition, the materials, methods, and examples are illustrative only and are not intended to be necessarily limiting.

[0029] It should be understood that the terms “a” and “an” as used above and elsewhere herein refer to “one or more” of the enumerated components. It will be clear to one of ordinary skill in the art that the use of the singular includes the plural unless specifically stated otherwise. Therefore, the terms “a,” “an” and “at least one” are used interchangeably in this application.

[0030] For purposes of better understanding the present teachings and in no way limiting the scope of the teachings, unless otherwise indicated, all numbers expressing quantities, percentages or proportions, and other numerical values used in the specification and claims, are to be understood as being modified in all instances by the term “about.” Accordingly, unless indicated to the contrary, the numerical parameters set forth in the following specification and attached claims are approximations that may vary depending upon the desired properties sought to be obtained. At the very least, each numerical parameter should at least be construed in light of the number of reported significant digits and by applying ordinary rounding techniques.

[0031] Unless otherwise stated, adjectives such as “substantially” and “about” modifying a condition or relationship characteristic of a feature or features of an embodiment of the invention, are understood to mean that the condition or characteristic is defined to within tolerances that are acceptable for operation of the embodiment for an application for which it is intended. Unless otherwise indicated, the word “or” in the specification and claims is considered to be the inclusive “or” rather than the exclusive or, and indicates at least one of, or any combination of items it conjoins.

[0032] In the description and claims of the present application, each of the verbs, “comprise,” “include” and “have” and conjugates thereof, are used to indicate that the object or objects of the verb are not necessarily a complete listing of components, elements or parts of the subject or subjects of the verb. Other terms as used herein are meant to be defined by their well-known meanings in the art.

[0033] The terms “nucleic acid template” and “donor”, refer to a nucleotide sequence that is inserted or copied into a genome. The nucleic acid template comprises a nucleotide sequence, e.g., of one or more nucleotides, that will be added to or will template a change in the target nucleic acid or may be used to modify the target sequence. A nucleic acid template sequence may be of any length, for example between 2 and 10,000 nucleotides in length, preferably between about 100 and 1,000 nucleotides in length, more preferably between about 200 and 500 nucleotides in length. A nucleic acid template may be a single stranded nucleic acid, a double stranded nucleic acid. In some embodiments, the nucleic acid template comprises a nucleotide sequence, e.g., of one or more nucleotides, that corresponds to wild type sequence of the target nucleic acid, e.g., of the target position. In some embodiments, the nucleic acid template comprises a nucleotide sequence, e.g., of one or more ribonucleotides, that corresponds to wild type sequence of the target nucleic acid, e.g., of the target position. In some embodiments, the nucleic acid template comprises modified nucleotides.

[0034] In some embodiments of the present invention, a DNA nuclease is utilized to affect a DNA break at a target site to induce cellular repair mechanisms, for example, but not limited to, non-homologous end-joining (NHEJ). During classical NHEJ, two ends of a double-strand break (DSB) site are ligated together in a fast but also inaccurate manner (i.e. frequently resulting in mutation of the DNA at the cleavage site in the form of small insertion or deletions) whereas during HDR, an intact homologous DNA donor is used to replace the DNA surrounding the cleavage site in an accurate manner. HDR can also mediate the precise insertion of exogenous DNA at the break site. Accordingly, the term “homology-directed repair” or “HDR” refers to a mechanism for repairing DNA damage in cells, for example, during repair of double-stranded and single-stranded breaks in DNA. HDR requires nucleotide sequence homology and uses a “nucleic acid template” (nucleic acid template or donor template used interchangeably herein) to repair the sequence where the double-stranded or single break occurred (e.g., DNA target sequence). This results in the transfer of genetic information from, for example, the nucleic acid template to the DNA target sequence. HDR may result in alteration of the DNA target sequence (e.g., insertion, deletion, mutation) if the nucleic acid template sequence differs from the DNA target sequence and part or all of the nucleic acid template polynucleotide or oligonucleotide is incorporated into the DNA target sequence. In some embodiments, an entire nucleic acid template polynucleotide, a portion of the nucleic acid template polynucleotide, or a copy of the nucleic acid template is integrated at the site of the DNA target sequence.

[0035] Insertion of an exogenous sequence (also called a “donor sequence,” donor template,” “donor molecule” or “donor”), for example, for insertion of a splice site to knockout expression of a gene, can also be carried out. For example, a donor sequence can contain a non-homologous sequence flanked by two regions of homology to allow for efficient HDR at the location of interest. Additionally, donor sequences can comprise a vector molecule containing sequences that are not homologous to the region of interest in cellular chromatin. A donor molecule can contain several, discontinuous regions of homology to cellular chromatin. For example, for targeted insertion of sequences not normally present in a region of interest, said sequences can be present in a donor nucleic acid molecule and flanked by regions of homology to sequence in the region of interest. A donor molecule may be any length, for example ranging from several bases e.g. 10-20 bases to multiple kilobases in length.

[0036] The donor polynucleotide can be DNA or RNA, single-stranded and/or double-stranded and can be introduced into a cell in linear or circular form. See, e.g., U.S. Publication Nos. 2010/0047805; 2011/0281361; 2011/0207221; and 2019/0330620. If introduced in linear form, the ends of the donor sequence can be protected (e.g., from exonucleolytic degradation) by methods known to those of skill in the art. For example, one or more dideoxynucleotide residues are added to the 3′ terminus of a linear molecule and/or self-complementary oligonucleotides are ligated to one or both ends. See, for example, Chang et al. (1987) and Nehls et al. (1996). Additional methods for protecting exogenous polynucleotides from degradation include, but are not limited to, addition of terminal amino group(s) and the use of modified internucleotide linkages such as, for example, phosphorothioates, phosphoramidates, and O-methyl ribose or deoxyribose residues.

[0037] Accordingly, embodiments of the present invention may use a donor template for HDR that is DNA or RNA, single-stranded and/or double-stranded and can be introduced into a cell in linear or circular form.

[0038] A donor sequence may be an oligonucleotide and be used for targeted alteration of an endogenous sequence. The oligonucleotide may be introduced to the cell on a vector, may be electroporated into the cell, or may be introduced via other methods known in the art. The oligonucleotide can be used to insert a sequence with a desired purpose into an endogenous locus (e.g. a splice acceptor sequence to prevent expression of a coding exon).

[0039] A polynucleotide can be introduced into a cell as part of a vector molecule having additional sequences such as, for example, replication origins, promoters and genes encoding antibiotic resistance. Moreover, donor polynucleotides can be introduced as naked nucleic acid, as nucleic acid complexed with an agent such as a liposome or poloxamer, or can be delivered by viruses (e.g., adenovirus, AAV, herpesvirus, retrovirus, lentivirus and integrase defective lentivirus (IDLV)).

[0040] The donor molecule may be inserted into an endogenous gene such that all, some or none of the endogenous gene is expressed.

[0041] Furthermore, although not required for expression, an exogenous sequence of a template may also include transcriptional or translational regulatory sequences, for example, splice donor or splice acceptor sites.

[0042] As used herein, the term “modified cells” refers to cells in which a double strand break is affected by a complex of an RNA molecule and the CRISPR nuclease as a result of hybridization with the target sequence, i.e. on-target hybridization. The term “modified cells” may further encompass cells in which a repair or correction of a mutation was affected following the double strand break.

[0043] This invention provides a modified cell or cells obtained by use of any of the methods described herein. In an embodiment these modified cell or cells are capable of giving rise to progeny cells. In an embodiment these modified cell or cells are capable of giving rise to progeny cells after engraftment. As a non-limiting example, the modified cells may be hematopoietic stem cell (HSC), or any cell suitable for an allogenic cell transplant or autologous cell transplant.

[0044] This invention also provides a composition comprising these modified cells and a pharmaceutically acceptable carrier. Also provided is an in vitro or ex vivo method of preparing this, comprising mixing the cells with the pharmaceutically acceptable carrier.

[0045] As used herein, the term “targeting sequence” or “targeting molecule” refers a nucleotide sequence or molecule comprising a nucleotide sequence that is capable of hybridizing to a specific target sequence, e.g., the targeting sequence has a nucleotide sequence which is at least partially complementary to the sequence being targeted along the length of the targeting sequence. The targeting sequence or targeting molecule may be part of an RNA molecule that can form a complex with a CRISPR nuclease, either alone or in combination with other RNA molecules, with the targeting sequence serving as the targeting portion of the CRISPR complex. When the molecule having the targeting sequence is present contemporaneously with the CRISPR molecule, the RNA molecule, alone or in combination with an additional one or more RNA molecules (e.g. a tracrRNA molecule), is capable of targeting the CRISPR nuclease to the specific target sequence. As non-limiting example, a guide sequence portion of a CRISPR RNA molecule or single-guide RNA molecule may serve as a targeting molecule. Each possibility represents a separate embodiment. A targeting sequence can be custom designed to target any desired sequence.

[0046] The term “targets” as used herein, refers to preferentially hybridizing a targeting sequence of a targeting molecule to a nucleic acid having a targeted nucleotide sequence. It is understood that the term “targets” encompasses variable hybridization efficiencies, such that there is preferential targeting of the nucleic acid having the targeted nucleotide sequence, but unintentional off-target hybridization in addition to on-target hybridization might also occur. It is understood that where an RNA molecule targets a sequence, a complex of the RNA molecule and a CRISPR nuclease molecule targets the sequence for nuclease activity.

[0047] The “guide sequence portion” of an RNA molecule refers to a nucleotide sequence that is capable of hybridizing to a specific target DNA sequence, e.g., the guide sequence portion has a nucleotide sequence which is partially or fully complementary to the DNA sequence being targeted along the length of the guide sequence portion. In some embodiments, the guide sequence portion is 17, 18, 19, 20, 21, 22, 23, 24, 25, 26, 27, 28, 29, 30, 31, 32, 33, 34, 35, 36, 37, 38, 39, 40, 41, 42, 43, 44, 45, 46, 47, 48, 49 or 50 nucleotides in length, or approximately 17-50, 17-49, 17-48, 17-47, 17-46, 17-45, 17-44, 17-43, 17-42, 17-41, 17-40, 17-39, 17-38, 17-37, 17-36, 17-35, 17-34, 17-33, 17-31, 17-30, 17-29, 17-28, 17-27, 17-26, 17-25, 17-24, 17-22, 17-21, 18-25, 18-24, 18-23, 18-22, 18-21, 19-25, 19-24, 19-23, 19-22, 19-21, 19-20, 20-22, 18-20, 20-21, 21-22, or 17-20 nucleotides in length. The entire length of the guide sequence portion is fully complementary to the DNA sequence being targeted along the length of the guide sequence portion. The guide sequence portion may be part of an RNA molecule that can form a complex with a CRISPR nuclease with the guide sequence portion serving as the DNA targeting portion of the CRISPR complex. When the DNA molecule having the guide sequence portion is present contemporaneously with the CRISPR molecule the RNA molecule is capable of targeting the CRISPR nuclease to the specific target DNA sequence. Each possibility represents a separate embodiment. An RNA molecule can be custom designed to target any desired sequence. Accordingly, a molecule comprising a “guide sequence portion” is a type of targeting molecule. In some embodiments, the guide sequence portion comprises a sequence that is the same as, or differs by no more than 1, 2, 3, 4, or 5 nucleotides from, a guide sequence portion described herein, e.g., a guide sequence set forth in any of SEQ ID NOs:1-20246. Each possibility represents a separate embodiment. In some of these embodiments, the guide sequence portion is fully complementary to the target sequence, and comprises a sequence that is the same as a sequence set forth in any of SEQ ID NOs:1-20246. Throughout this application, the terms “guide molecule,” “RNA guide molecule,” “guide RNA molecule,” and “gRNA molecule” are synonymous with a molecule comprising a guide sequence portion.

[0048] The term “non-discriminatory” as used herein refers to a guide sequence portion of an RNA molecule that targets a specific DNA sequence that is common both a mutant and functional allele of a gene.

[0049] In embodiments of the present invention, an RNA molecule comprises a guide sequence portion having 17-50 contiguous nucleotides containing nucleotides in the sequence set forth in any one of SEQ ID NOs: 1-20246.

[0050] The RNA molecule and or the guide sequence portion of the RNA molecule may contain modified nucleotides. Exemplary modifications to nucleotides/polynucleotides may be synthetic and encompass polynucleotides which contain nucleotides comprising bases other than the naturally occurring adenine, cytosine, thymine, uracil, or guanine bases. Modifications to polynucleotides include polynucleotides which contain synthetic, non-naturally occurring nucleosides e.g., locked nucleic acids. Modifications to polynucleotides may be utilized to increase or decrease stability of an RNA. An example of a modified polynucleotide is an mRNA containing 1-methyl pseudo-uridine. For examples of modified polynucleotides and their uses, see U.S. Pat. No. 8,278,036, PCT International Publication No. WO/2015/006747, and Weissman and Kariko (2015), hereby incorporated by reference.

[0051] As used herein, “contiguous nucleotides” set forth in a SEQ ID NO refers to nucleotides in a sequence of nucleotides in the order set forth in the SEQ ID NO without any intervening nucleotides.

[0052] In embodiments of the present invention, the guide sequence portion may be 25 nucleotides in length and contain 20-22 contiguous nucleotides in the sequence set forth in any one of SEQ ID NOs: 1-20246. In embodiments of the present invention, the guide sequence portion may be less than 22 nucleotides in length. For example, in embodiments of the present invention the guide sequence portion may be 17, 18, 19, 20, or 21 nucleotides in length. In such embodiments the guide sequence portion may consist of 17, 18, 19, 20, or 21 nucleotides, respectively, in the sequence of 17-22 contiguous nucleotides set forth in any one of SEQ ID NOs: 1-20246. For example, a guide sequence portion having 17 nucleotides in the sequence of 17 contiguous nucleotides set forth in SEQ ID NO: 20247 may consist of any one of the following nucleotide sequences (nucleotides excluded from the contiguous sequence are marked in strike-through):

(SEQ ID NO: 20247)
AAAAAAAUGUACUUGGUUCC
17 nucleotide guide sequence 1:
(SEQ ID NO: 20248)
AAAAAAAUGUACUUGGUUCC
17 nucleotide guide sequence 2:
(SEQ ID NO: 20249)
AAAAAAAUGUACUUGGUUCC
17 nucleotide guide sequence 3:
(SEQ ID NO: 20250)
AAAAAAAUGUACUUGGUUCC
17 nucleotide guide sequence 4:
(SEQ ID NO: 20251)
AAAAAAAUGUACUUGGUUCC

[0053] In embodiments of the present invention, the guide sequence portion may be greater than 20 nucleotides in length. For example, in embodiments of the present invention the guide sequence portion may be 21, 22, 23, 24 or 25 nucleotides in length. In such embodiments the guide sequence portion comprises 17-50 nucleotides containing the sequence of 20, 21 or 22 contiguous nucleotides set forth in any one of SEQ ID NOs: 1-20246 and additional nucleotides fully complimentary to a nucleotide or sequence of nucleotides adjacent to the 3′ end of the target sequence, 5′ end of the target sequence, or both.

[0054] In embodiments of the present invention a CRISPR nuclease and an RNA molecule comprising a guide sequence portion form a CRISPR complex that binds to a target DNA sequence to effect cleavage of the target DNA sequence. CRISPR nucleases, e.g. Cpf1, may form a CRISPR complex comprising a CRISPR nuclease and RNA molecule without a further tracrRNA molecule. Alternatively, CRISPR nucleases, e.g. Cas9, may form a CRISPR complex between the CRISPR nuclease, an RNA molecule, and a tracrRNA molecule. A guide sequence portion, which comprises a nucleotide sequence that is capable of hybridizing to a specific target DNA sequence, and a sequence portion that participates in CRIPSR nuclease binding, e.g. a tracrRNA sequence portion, can be located on the same RNA molecule. Alternatively, a guide sequence portion may be located on one RNA molecule and a sequence portion that participates in CRIPSR nuclease binding, e.g. a tracrRNA portion, may located on a separate RNA molecule. A single RNA molecule comprising a guide sequence portion (e.g. a DNA-targeting RNA sequence) and at least one CRISPR protein-binding RNA sequence portion (e.g. a tracrRNA sequence portion), can form a complex with a CRISPR nuclease and serve as the DNA-targeting molecule. In some embodiments, a first RNA molecule comprising a DNA-targeting RNA portion, which includes a guide sequence portion, and a second RNA molecule comprising a CRISPR protein-binding RNA sequence interact by base pairing to form an RNA complex that targets the CRISPR nuclease to a DNA target site or, alternatively, are fused together to form an RNA molecule that complexes with the CRISPR nuclease and targets the CRISPR nuclease to a DNA target site.

[0055] In embodiments of the present invention, a RNA molecule comprising a guide sequence portion may further comprise the sequence of a tracrRNA molecule. Such embodiments may be designed as a synthetic fusion of the guide portion of the RNA molecule and the trans-activating crRNA (tracrRNA). (See Jinek et al., 2012). In such an embodiment, the RNA molecule is a single guide RNA (sgRNA) molecule. Embodiments of the present invention may also form CRISPR complexes utilizing a separate tracrRNA molecule and a separate RNA molecule comprising a guide sequence portion. In such embodiments the tracrRNA molecule may hybridize with the RNA molecule via basepairing and may be advantageous in certain applications of the invention described herein.

[0056] The term “tracr mate sequence” refers to a sequence sufficiently complementary to a tracrRNA molecule so as to hybridize to the tracrRNA via basepairing and promote the formation of a CRISPR complex. (See U.S. Pat. No. 8,906,616). In embodiments of the present invention, the RNA molecule may further comprise a portion having a tracr mate sequence.

[0057] A “gene,” for the purposes of the present disclosure, includes a DNA region encoding a gene product, as well as all DNA regions which regulate the production of the gene product, whether or not such regulatory sequences are adjacent to coding and/or transcribed sequences. Accordingly, a gene includes, but is not necessarily limited to, promoter sequences, terminators, translational regulatory sequences such as ribosome binding sites and internal ribosome entry sites, enhancers, silencers, insulators, boundary elements, replication origins, matrix attachment sites and locus control regions.

[0058] “Eukaryotic” cells include, but are not limited to, fungal cells (such as yeast), plant cells, animal cells, mammalian cells and human cells.

[0059] The term “nuclease” as used herein refers to an enzyme capable of cleaving the phosphodiester bonds between the nucleotide subunits of nucleic acid. A nuclease may be isolated or derived from a natural source. The natural source may be any living organism.

[0060] Alternatively, a nuclease may be a modified or a synthetic protein which retains the phosphodiester bond cleaving activity. Gene modification can be achieved using a nuclease, for example a CRISPR nuclease.

[0061] As used herein, the term “HSC” refers to both hematopoietic stem cells and hematopoietic stem progenitor cells. Non-limiting examples of stem cells include bone marrow cells, myeloid progenitor cells, a multipotent progenitor cells, a lineage restricted progenitor cells.

[0062] As used herein, “progenitor cell” refers to a lineage cell that is derived from stem cell and retains mitotic capacity and multipotency (e.g., can differentiate or develop into more than one but not all types of mature lineage of cell). As used herein “hematopoiesis” or “hemopoiesis” refers to the formation and development of various types of blood cells (e.g., red blood cells, megakaryocytes, myeloid cells (e.g., monocytes, macrophages and neutrophil), and lymphocytes) and other formed elements in the body (e.g., in the bone marrow).

[0063] The term “single nucleotide polymorphism (SNP) position”, as used herein, refers to a position in which a single nucleotide DNA sequence variation occurs between members of a species, or between paired chromosomes in an individual. In the case that a SNP position exists at paired chromosomes in an individual, a SNP on one of the chromosomes is a “heterozygous SNP.” The term SNP position refers to the particular nucleic acid position where a specific variation occurs and encompasses both a sequence including the variation from the most frequently occurring base at the particular nucleic acid position (also referred to as “SNP” or alternative “ALT”) and a sequence including the most frequently occurring base at the particular nucleic acid position (also referred to as reference, or “REF”). Accordingly, the sequence of a SNP position may reflect a SNP (i.e. an alternative sequence variant relative to a consensus reference sequence within a population), or the reference sequence itself.

[0064] According to embodiments of the present invention, there is provided a method for modifying in a cell a mutant allele of the sterile alpha motif domain containing 9 like (SAMD9L) gene having a mutation associated with ATXPC syndrome, the method comprising
[0065] introducing to the cell a composition comprising:
   [0066] at least one CRISPR nuclease or a sequence encoding a CRISPR nuclease; and
   [0067] a first RNA molecule comprising a guide sequence portion having 17-50 nucleotides or a nucleotide sequence encoding the same,
[0068] wherein a complex of the CRISPR nuclease and the first RNA molecule affects a double strand break in the mutant allele of the SAMD9L gene.

[0069] In some embodiments, the first RNA molecule targets the CRISPR nuclease to the mutation associated with ATXPC syndrome.

[0070] In some embodiments, the mutation associated with ATXPC syndrome is any one of

| | | | |
|---|---|---|---|
| 7:93131324_A_G, | 7:93131411_G_C, | 7:93131438_C_T, | 7:93131495_T_C, |
| 7:93132080_G_C, | 7:93132130_C_T, | 7:93132385_C_G, | 7:93132434_A_T, |
| 7:93132530_C_G, | 7:93132545_T_C, | 7:93132619_T_C, | 7:93132872_C_A, |
| 7:93133009_A_G, | 7:93133016_G_A, | 7:93133016_G_T, | 7:93133300_A_G, |
| 7:93133332_G_T, | 7:93133453_A_T, | 7:93133790_A_G, | 7:93133858_TA_CT, |
| 7:93133907_G_A, | 7:93134063_C_A, | 7:93134063_C_T, | 7:93134095_G_A, |
| 7:93134423_A_T, | 7:93134973_C_A, | 7:93134973_C_G, | 7:93134993_T_C, |
| 7:93135232_C_G, | 7:93135268_CC_GA, | 7:93135269_C_T, | 7:93135313_T_C, |
| 7:93135314_C_T, | 7:93135604_G_A, | 7:93135805_A_G, | 7:93135822_TAA_ACT, |
| 7:93135822_TAA_GCT, | and 7:93135823_A_G. | | |

[0071] In some embodiments, the guide sequence portion of the first RNA molecule comprises 17-50 contiguous nucleotides containing nucleotides in the sequence set forth in any one of SEQ ID NOs: 1-20246 that targets a mutation associated with ATXPC syndrome.

[0072] In some embodiments, the method further comprises introduction of a donor molecule for alteration of the SAMD9 mutant allele. In some embodiments, the donor molecule encodes a synthetic splice site (e.g. a splice acceptor or splice donor site) for insertion into the SAMD9 mutant allele.

[0073] In some embodiments, the first RNA molecule targets the CRISPR nuclease to a SNP position of the mutant allele.

[0074] In some embodiments, the SNP position is any one of rs2157743, rs78002733, rs6964942, rs6965114, rs574912862, rs66986908, rs2374628, rs7786423, rs2374629, rs4267, rs71830352, 7:93130660_A_AGTGT, rs10236444, rs4268, rs10282508, rs1029357, rs10488532, rs1133906, rs61599939, and rs34330527.

[0075] In some embodiments, the guide sequence portion of the first RNA molecule comprises 17-50 contiguous nucleotides containing nucleotides in the sequence set forth in any one of SEQ ID NOs: 1-20246 that targets a SNP position of the mutant allele.

[0076] In some embodiments, the SNP position is in an exon of the SAMD9L mutant allele.

[0077] In some embodiments, the SNP position contains a heterozygous SNP.

[0078] In some embodiments, the method further comprises introducing to the cell a second RNA molecule comprising a guide sequence portion having 17-50 nucleotides or a nucleotide sequence encoding the same, wherein a complex of the second RNA molecule and a CRISPR nuclease affects a second double strand break in the SAMD9L gene.

[0079] In some embodiments, the guide sequence portion of the second RNA molecule comprises 17-50 contiguous nucleotides containing nucleotides in the sequence set forth in any one of SEQ ID NOs: 1-20246 other than the sequence of the first RNA molecule.

[0080] In some embodiments, the second RNA molecule comprises a non-discriminatory guide portion that targets both functional and mutated SAMD9L alleles.

[0081] In some embodiments, the second RNA molecule comprises a non-discriminatory guide portion that targets any one of a SAMD9L untranslated region (UTR), an intergenic region upstream of SAMD9L, an intergenic region downstream of SAMD9L, or Intron 4 of SAMD9L.

[0082] In some embodiments, the second RNA molecule comprises a non-discriminatory guide portion that targets a sequence that is located within a genomic range selected from any one of 7:93130717-7:93131216, 7:93129556-7:93130056, 7:93135992-7:93136491, and

[0083] In some embodiments, the second RNA molecule comprises a non-discriminatory guide portion that targets a sequence that is located up to 500 base pairs from the sequence targeted by the first RNA molecule.

[0084] In some embodiments, a portion of an exon is excised from the mutant allele of the SAMD9L gene.

[0085] In some embodiments, the first RNA molecule targets a SNP position in the 3′ UTR of the mutated allele, and the second RNA molecule comprises a non-discriminatory guide portion that targets downstream of a polyadenylation signal sequence that is common to both a functional allele and the mutant allele of the SAMD9L gene.

[0086] In some embodiments, the first RNA molecule targets a SNP position downstream of a polyadenylation signal of the mutated allele, and the second RNA molecule comprises a non-discriminatory guide portion that targets a sequence upstream of a polyadenylation signal that is common to both a functional allele and the mutant allele of the SAMD9L gene.

[0087] In some embodiments, the polyadenylation signal is excised from the mutant allele of the SAMD9L gene.

[0088] According to embodiments of the present invention, there is provided a modified cell obtained by the method of any one of the embodiments presented herein.

[0089] According to embodiments of the present invention, there is provided a first RNA molecule comprising a guide sequence portion having 17-50 contiguous nucleotides containing nucleotides in the sequence set forth in any one of SEQ ID NOs: 1-20246.

[0090] According to embodiments of the present invention, there is provided a composition comprising the first RNA molecule and at least one CRISPR nuclease.

[0091] In some embodiments, the composition further comprises a second RNA molecule comprising a guide sequence portion having 17-50 contiguous nucleotides, wherein the second RNA molecule targets a SAMD9L allele, and wherein the guide sequence portion of the second RNA molecule is a different sequence from the sequence of the guide sequence portion of the first RNA molecule.

[0092] In some embodiments, the guide sequence portion of the second RNA molecule comprises 17-50 contiguous nucleotides containing nucleotides in the sequence set forth in any one of SEQ ID NOs: 1-20246 other than the sequence of the first RNA molecule.

[0093] According to embodiments of the present invention, there is provided a method for inactivating a mutant SAMD9L allele in a cell, the method comprising delivering to the cell the composition of any one of the embodiments presented herein.

[0094] According to embodiments of the present invention, there is provided a method for treating ATXPC syndrome, the method comprising delivering to a cell of a subject having ATXPC syndrome the composition of any one of the embodiments presented herein.

[0095] According to embodiments of the present invention, there is provided use of any one of the compositions presented herein for inactivating a mutant SAMD9L allele in a cell, comprising delivering to the cell the composition of any one of the embodiments presented herein.

[0096] According to embodiments of the present invention, there is provided a medicament comprising the composition of any one of the embodiments presented herein for use in inactivating a mutant SAMD9L allele in a cell, wherein the medicament is administered by delivering to the cell the composition of any one of the embodiments presented herein.

[0097] According to embodiments of the present invention, there is provided use of the composition of any one of the embodiments presented herein for treating ameliorating or preventing ATXPC syndrome, comprising delivering to a cell of a subject having or at risk of having ATXPC syndrome the composition of any one of the embodiments presented herein.

[0098] According to embodiments of the present invention, there is provided a medicament comprising the composition of any one of the embodiments presented herein for use in treating ameliorating or preventing ATXPC syndrome, wherein the medicament is administered by delivering to a cell of a subject having or at risk of having ATXPC syndrome the composition of any one of the embodiments presented herein.

[0099] According to embodiments of the present invention, there is provided a kit for inactivating a mutant SAMD9L allele in a cell, comprising an RNA molecule of any one of the embodiments presented herein, a CRISPR nuclease, and/or a tracrRNA molecule; and instructions for delivering the RNA molecule; CRISPR nuclease, and/or the tracrRNA to the cell.

[0100] According to embodiments of the present invention, there is provided a kit for treating ATXPC syndrome in a subject, comprising an RNA molecule of any one of the embodiments presented herein, a CRISPR nuclease, and/or a tracrRNA molecule; and instructions for delivering the RNA molecule; CRISPR nuclease, and/or the tracrRNA to a cell of a subject having or at risk of having ATXPC syndrome.

[0101] According to embodiments of the present invention, there is provided a gene editing composition comprising an RNA molecule comprising a guide sequence portion having 17-50 contiguous nucleotides containing nucleotides in the sequence set forth in any one of SEQ ID NOs: 1-20246. In some embodiments, the RNA molecule further comprises a portion having a sequence which binds to a CRISPR nuclease. In some embodiments, the sequence which binds to a CRISPR nuclease is a tracrRNA sequence.

[0102] In some embodiments, the RNA molecule further comprises a portion having a tracr mate sequence.

[0103] In some embodiments, the RNA molecule may further comprise one or more linker portions.

[0104] According to embodiments of the present invention, an RNA molecule may be up to 1000, 900, 800, 700, 600, 500, 450, 400, 350, 300, 290, 280, 270, 260, 250, 240, 230, 220, 210, 200, 190, 180, 170, 160, 150, 140, 130, 120, 110, or 100 nucleotides in length. Each possibility represents a separate embodiment. In embodiments of the present invention, the RNA molecule may be 17 up to 300 nucleotides in length, 100 up to 300 nucleotides in length, 150 up to 300 nucleotides in length, 100 up to 500 nucleotides in length, 100 up to 400 nucleotides in length, 200 up to 300 nucleotides in length, 100 to 200 nucleotides in length, or 150 up to 250 nucleotides in length. Each possibility represents a separate embodiment.

[0105] According to some embodiments of the present invention, the composition further comprises a tracrRNA molecule.

[0106] The present disclosure provides a method for utilizing at least one naturally occurring nucleotide difference or polymorphism (e.g., single nucleotide polymorphism (SNP)) for distinguishing/discriminating between two alleles of a gene, one allele bearing a mutation such that it encodes a mutated protein causing a disease phenotype (“mutated allele”) and a particular sequence in a SNP position (SNP/REF), and the other allele encoding for a functional protein (“functional allele”). The method further comprises the step of knocking out expression of the mutated protein and allowing expression of the functional protein. In some embodiments, the method is for treating, ameliorating, or preventing a dominant negative genetic disorder.

[0107] According to some embodiments of the present invention, there is provided a method for inactivating a mutant SAMD9L allele in a cell, the method comprising delivering to the cell a composition comprising an RNA molecule comprising a guide sequence portion having 17-50 contiguous nucleotides containing nucleotides in the sequence set forth in any one of SEQ ID NOs: 1-20246 and a CRISPR nuclease.

[0108] According to some embodiments of the present invention, there is provided a method for treating ATXPC syndrome, the method comprising delivering to a cell of a subject having ATXPC syndrome a composition comprising an RNA molecule comprising a guide sequence portion having 17-50 contiguous nucleotides containing nucleotides in the sequence set forth in any one of SEQ ID NOs: 1-20246 and a CRISPR nuclease.

[0109] According to embodiments of the present invention, the composition comprises a second RNA molecule comprising a guide sequence portion having 17-50 contiguous nucleotides containing nucleotides in the sequence set forth in any one of SEQ ID NOs: 1-20246. In some embodiments, the 17-50 nucleotides of the guide sequence portion of the second RNA molecule are in a different sequence from the sequence of the guide sequence portion of the first RNA molecule.

[0110] According to embodiments of the present invention, at least one CRISPR nuclease and the RNA molecule or RNA molecules are delivered to the subject and/or cells substantially at the same time or at different times.

[0111] In some embodiments, a tracrRNA molecule is delivered to the subject and/or cells substantially at the same time or at different times as the CRISPR nuclease and RNA molecule or RNA molecules.

[0112] According to embodiments of the present invention, the first RNA molecule targets a SNP or disease-causing mutation in the exon or promoter of a mutated allele, and the second RNA molecule targets a SNP in an exon of the mutated allele, a SNP in an intron, or a sequence present in both the mutated or functional allele.

[0113] According to embodiments of the present invention, the first RNA molecule or the first and the second RNA molecules target a SNP in the promoter region, the start codon, or an untranslated region (UTR) of a mutated allele.

[0114] According to embodiments of the present invention, the first RNA molecule or the first and the second RNA molecules targets at least a portion of the promoter and/or the start codon and/or a portion of a UTR of a mutated allele.

[0115] According to embodiments of the present invention, the first RNA molecule targets a portion of the promoter, a first SNP in the promoter, or a SNP upstream to the promoter of a mutated allele and the second RNA molecule is targets a second SNP, which is downstream of the first SNP, and is in the promoter, in a UTR, or in an intron or in an exon of a mutated allele.

[0116] According to embodiments of the present invention, the first RNA molecule targets a SNP in the promoter, upstream of the promoter, or a UTR of a mutated allele and the second RNA molecule is designed to target a sequence which is present in an intron of both the mutated allele and the functional allele.

[0117] According to embodiments of the present invention, the first RNA molecule targets a SNP in an intron of a mutated allele, and wherein the second RNA molecule targets a SNP in an intron of the mutated allele, or a sequence in an intron present in both the mutated and functional allele.

[0118] According to embodiments of the present invention, the first RNA molecule targets a sequence upstream of the promotor which is present in both a mutated and functional allele and the second RNA molecule targets a SNP or disease-causing mutation in any location of the gene.

[0119] According to embodiments of the present invention, there is provided a method comprising removing an exon containing a disease-causing mutation from a mutated allele, wherein the first RNA molecule or the first and the second RNA molecules target regions flanking an entire exon or a portion of the exon.

[0120] According to embodiments of the present invention, there is provided a method comprising removing an exon or a portion thereof from a mutant SAMD9L allele, the entire open reading frame of a mutant SAMD9L allele, or removing the entire mutant SAMD9L allele.

[0121] According to embodiments of the present invention, the first RNA molecule targets a SNP or disease-causing mutation in an exon or promoter of a mutated allele, and wherein the second RNA molecule targets a SNP in the same exon of the mutated allele, a SNP in an intron, or a sequence in an intron present in both the mutated and functional allele.

[0122] According to embodiments of the present invention, the first RNA molecule or the first and the second RNA molecules target an alternative splicing signal sequence between an exon and an intron of a mutant SAMD9L allele.

[0123] According to embodiments of the present invention, the second RNA molecule is non-discriminatory targets a sequence present in both a mutated allele and a functional allele.

[0124] The compositions and methods of the present disclosure may be utilized for treating, preventing, ameliorating, or slowing progression of an autosomal dominant genetic disorder, such as ATXPC syndrome.

[0125] In some embodiments, a mutated allele is deactivated by delivering to a cell an RNA molecule which targets a SNP in the promoter region, the start codon, or an untranslated region (UTR) of the mutated allele.

[0126] In some embodiments, a mutated allele is inactivated by removing at least a portion of the promoter, and/or removing the start codon, and/or a portion of the UTR, and/or a polyadenylation signal. In such embodiments one RNA molecule may be designed for targeting a first SNP in the promoter or upstream to the promoter and another RNA molecule is designed to target a second SNP, which is downstream of the first SNP, and is in the promoter, in the UTR, in an intron, or in an exon. Alternatively, one RNA molecule may be designed for targeting a SNP in the promoter, upstream of the promoter, or the UTR, and another RNA molecule is designed to target a sequence which is present in an intron of both the mutated allele and the functional allele. Alternatively, one RNA molecule may be designed for targeting a sequence upstream of the promotor which is present in both the mutated and functional allele and the other guide is designed to target a SNP or disease-causing mutation in any location of the gene e.g., in an exon, intron, UTR, or downstream of the promoter.

[0127] In some embodiments, the method of deactivating a mutated allele comprises an exon skipping step comprising removing an exon containing a disease-causing mutation from the mutated allele. Removing an exon containing a disease-causing mutation in the mutated allele requires two RNA molecules which target regions flanking the entire exon or a portion of the exon. Removal of an exon containing the disease-causing mutation may be designed to eliminate the disease-causing action of the protein while allowing for expression of the remaining protein product which retains some or all of the wild-type activity. The entire open reading frame or the entire gene can be excised using two RNA molecules flanking the region desired to be excised.

[0128] In some embodiments, the method of deactivating a mutated allele comprises delivering two RNA molecules to a cell, wherein one RNA molecule targets a SNP or disease-causing mutation in an exon or promoter of the mutated allele, and wherein the other RNA molecule targets a SNP in the same of the mutated allele, a SNP in an intron, or a sequence in an intron present in both the mutated or functional allele.

[0129] Any one of, or combination of, the above-mentioned strategies for deactivating a mutant allele may be used in the context of the invention.

[0130] In embodiments of the present invention, an RNA molecule is used to direct a CRISPR nuclease to an exon or a splice site of a mutated allele in order to create a double-stranded break (DSB), leading to insertion or deletion of nucleotides by inducing an error-prone non-homologous end-joining (NHEJ) mechanism and formation of a frameshift mutation in the mutated allele. The frameshift mutation may result in, for example, inactivation or knockout of the mutated allele by generation of an early stop codon in the mutated allele and to generation of a truncated protein or to nonsense-mediated mRNA decay of the transcript of the mutant allele. In further embodiments, one RNA molecule is used to direct a CRISPR nuclease to a promotor of a mutated allele.

[0131] In some embodiments, the method of deactivating a mutated allele further comprises enhancing activity of the functional protein such as by providing a protein/peptide, a nucleic acid encoding a protein/peptide, or a small molecule such as a chemical compound, capable of activating/enhancing activity of the functional protein.

[0132] According to some embodiments, the present disclosure provides an RNA sequence (also referred to as an ‘RNA molecule’) which binds to or associates with and/or directs an RNA-guided DNA nuclease e.g., a CRISPR nuclease, to a target sequence comprising at least one nucleotide which differs between a mutated allele and a functional allele (e.g., SNP) of a gene of interest (i.e., a sequence of the mutated allele which is not present in the functional allele).

[0133] In some embodiments, the method comprises contacting a mutated allele of a gene of interest with an allele-specific RNA molecule and a CRISPR nuclease e.g., a Cas9 protein, wherein the allele-specific RNA molecule and the CRISPR nuclease associate with a nucleotide sequence of the mutated allele of the gene of interest which differs by at least one nucleotide from a nucleotide sequence of a functional allele of the gene of interest, thereby modifying or knocking-out the mutated allele.

[0134] In some embodiments, the allele-specific RNA molecule and a CRISPR nuclease is introduced to a cell encoding the gene of interest. In some embodiments, the cell encoding the gene of interest is in a mammalian subject. In some embodiments, the cell encoding the gene of interest is in a plant.

[0135] In some embodiments, the mutated allele is an allele of SAMD9L gene. In some embodiments, the RNA molecule targets a SNP which co-exists with or is genetically linked to the mutated sequence associated with ATXPC syndrome genetic disorder. In some embodiments, the RNA molecule targets a SNP which is highly prevalent in the population and exists in the mutated allele having the mutated sequence associated with ATXPC syndrome genetic disorder and not in the functional allele of an individual subject to be treated. In some embodiments, a disease-causing mutation within a mutated SAMD9L allele is targeted.

[0136] In some embodiments, the SNP is within an exon of the gene of interest. In such embodiments, a guide sequence portion of an RNA molecule is designed to associate with a sequence of an exon of the gene of interest.

[0137] In some embodiments, SNP is within an intron or the exon of the gene of interest. In some embodiments, the SNP is in close proximity to the splice site between an intron and an exon. In some embodiments, the close proximity to a splice site is 1, 2, 3, 4, 5, 6, 7, 8, 9, 10, 11, 12, 13, 14, 15, 16, 17, 18, 19, or 20 nucleotides upstream or downstream to the splice site. Each possibility represents a separate embodiment of the present invention. In such embodiments, a guide sequence portion of an RNA molecule may be designed to associate with a sequence of the gene of interest which comprises the splice site.

[0138] In some embodiments, the method is utilized for treating a subject having a disease phenotype resulting from the heterozygote SAMD9L gene. In such embodiments, the method results in improvement, amelioration or prevention of the disease phenotype.

[0139] Embodiments of compositions described herein include at least one CRISPR nuclease, RNA molecule(s), and a tracrRNA molecule, being effective in a subject or cells at the same time. The at least one CRISPR nuclease, RNA molecule(s), and tracrRNA may be delivered substantially at the same time or can be delivered at different times but have effect at the same time. For example, this includes delivering the CRISPR nuclease to the subject or cells before the RNA molecule and/or tracrRNA is substantially extant in the subject or cells.

[0140] In some embodiments, the cell is a stem cell. In some embodiments, the cell is an embryonic stem cell. In some embodiments, the stem cell is a hematopoietic stem/progenitor cell (HSC).

### Dominant Genetic Disorders

[0141] One of skill in the art will appreciate that all subjects with any type of heterozygote genetic disorder (e.g., dominant genetic disorder) may be subjected to the methods described herein. In one embodiment, the present invention may be used to target a gene involved in, associated with, or causative of dominant genetic disorders such as, for example, ATXPC syndrome. In some embodiments, the dominant genetic disorder is ATXPC syndrome. In some embodiments, the target gene is the SAMD9L gene (Entrez Gene, gene ID No: 54809). Non-limiting examples of mutations previously characterized as gain of function mutations associated with ATXPC syndrome phenotype include: 7:93131324 _A_G, 7:93131411_G_C, 7:93131438_C_T, 7:93131495_T_C, 7:93132080_G_C, 7:93132130_ C_T, 7:93132385_C_G, 7:93132434_A_T, 7:93132530_C_G, 7:93132545_T_C, 7:93132619_T_C, 7:93132872_C_A, 7:93133009_A_G, 7:93133016_G_A, 7:93133016_G_T, 7:93133300_A_G, 7:93133332_G_T, 7:93133453_A_T, 7:93133790_A_G, 7:93133858_TA_CT, 7:93133907_G_A, 7:93134063_C_A, 7:93134063_C_T, 7:93134095_G_A, 7:93134423_A_T, 7:93134973_C_A, 7:93134973_C_G, 7:93134993_T_C, 7:93135232_C_G, 7:93135268_CC_GA, 7:93135269_C_T, 7:93135313_T_C, 7:93135314_C_T, 7:93135604_G_A, 7:93135805_A_G, 7:93135822_TAA_CT, 7:93135822_TAA_GCT, and 7:93135823_A_G.

[0142] SAMD9L editing strategies include, but are not limited to, (1) truncation; (2) inhibiting expression of a mutated SAMD9L allele; (3) excision of the mutated coding exon or polyadenylation signal; and (4) targeting a SAMD9L mutation to induce a frameshift; and (5) inducing homology directed repair (HDR) to introduce a synthetic splice site upstream of the coding exon with a donor molecule.

[0143] Truncation can be achieved by several approaches. For example, excision may be achieved by targeting the mutant SAMD9L allele with two different RNA molecules, e.g. single guide RNA molecules or “sgRNAs”. At least one RNA molecule is preferably allele-specific. Alternatively, truncation may also be achieved by targeting a SNP within the coding exon of a mutant SAMD9 allele using a single guide RNA molecule.

[0144] In another approach, truncation can be achieved by introducing a splice acceptor by HDR. A splice acceptor sequence can be introduced using, for example, a double-stranded donor oligonucleotide (dsODN) template that will be introduced in Intron 4 before the coding exon.

[0145] In another editing strategy, expression of a mutated SAMD9L allele may be inhibited. This can be achieved by excising the polyadenylation signal in the 3′UTR region, which leads to an unstable transcript.

[0146] According to embodiments of the present invention, there is provided an RNA molecule comprising a guide sequence portion (e.g. a targeting sequence) comprising a nucleotide sequence that is fully or partially complementary to a target sequence in a SNP position (REF/SNP sequence) located in or near a mutated allele of the SAMD9L gene. In some embodiments, the guide sequence portion of the RNA molecule consists of 16, 17, 18, 19, 20, 21, 22, 23, 24, 25, 26, or more than 26 nucleotides. In such embodiments, the guide sequence portion comprises a sequence that is the same as or differs by no more than 1, 2, or 3 nucleotides from a sequence set forth in Table 1. Each possibility represents a separate embodiment. In some embodiments the guide sequence portion is configured to target a CRISPR nuclease to a target sequence and provide a cleavage event, by a CRISPR nuclease complexed therewith, selected from a double-strand break and a single-strand break within 500, 400, 300, 200, 100, 50, 25, or 10 nucleotides of a SAMD9L target site. In some embodiments, the cleavage event enables non-sense mediated decay of the SAMD9L gene. In some embodiments, the RNA molecule is a guide RNA molecule such as a crRNA molecule or a single guide RNA molecule.

[0147] In some embodiments, the target sequence of a mutated allele of SAMD9L gene is altered (e.g., by introduction of an NHEJ-mediated indel (e.g., insertion or deletion), and results in reduction or elimination of expression of the gene product encoded by the mutant allele of SAMD9L gene. In some embodiments, the reduction or elimination of expression is due to non-sense mediated mRNA decay such as due to immature stop codon. In some embodiments, the reduction or elimination of expression is due to expression of a truncated form of the SAMD9L gene product. In some embodiments, the guide sequence portion is complementary to a target sequence in a SNP position located in the coding exon (Exon V) or from 7, 30, or 50 base pairs upstream to 7, 30, or 50 base pairs downstream of the coding exon (Exon V) of the mutated allele of the SAMD9L gene. Each possibility represents a separate embodiment. In such embodiments, the guide sequence portion comprises a sequence that targets a SNP position selected from: rs10282508, rs1029357, rs10488532, or rs1133906. In such embodiments, the guide sequence portion comprises a sequence that is the same as or differs by no more than 1, 2, or 3 nucleotides from a sequence set forth in any of the SEQ ID NOs listed as targeting rs10282508, rs1029357, rs10488532, or rs1133906 in Table 1. Each possibility represents a separate embodiment.

[0148] In some embodiments, a mutation in Exon V is targeted to eliminate reduce expression of the gene product encoded by the mutant allele of SAMD9L gene. In some embodiments, the reduction or elimination of expression is due to non-sense mediated mRNA decay such as due to immature stop codon. In some embodiments, the reduction or elimination of expression is due to expression of a truncated form of the SAMD9L gene product by the mutant allele. In some embodiments, a donor HDR is further introduced to correct the sequence of the mutant allele of the SAMD9L gene. In some embodiments, the guide sequence portion comprises a sequence that targets a mutation selected from the group consisting of:

| | | | |
|---|---|---|---|
| 7:93131324_A_G, | 7:93131411_G_C, | 7:93131438_C_T, | 7:93131495_T_C, |
| 7:93132080_G_C, | 7:93132130_C_T, | 7:93132385_C_G, | 7:93132434_A_T, |
| 7:93132530_C_G, | 7:93132545_T_C’ | 7:93132619_T_C, | 7:93132872_C_A, |
| 7:93133009_A_G, | 7:93133016_G_A, | 7:93133016_G_T, | 7:93133300_A_G, |
| 7:93133332_G_T, | 7:93133453_A_T, | 7:93133790_A_G, | 7:93133858_TA_CT, |
| 7:93133907_G_A, | 7:93134063_C_A, | 7:93134063_C_T, | 7:93134095_G_A, |
| 7:93134423_A_T, | 7:93134973_C_A, | 7:93134973_C_G, | 7:93134993_T_C, |
| 7:93135232_C_G, | 7:93135268_CC_GA, | 7:93135269_C_T, | 7:93135313_T_C, |
| 7:93135314_C_T, | 7:93135604_G_A, | 7:93135805_A_G, | 7:93135822_TAA_ACT, |
| 7:93135822_TAA_GCT, | 7:93135823_A_G. | | |

[0149] In some embodiments, the expression of the coding exon of a mutated allele of SAMD9 gene is eliminated by introducing a splice acceptor directly upstream of the coding exon (e.g., to intron 4) of the mutated allele. In some embodiments, the target sequence is a SNP position in intron 4 of a mutated allele of SAMD9L gene, to which a splice acceptor is introduced such as by HDR following double-strand break (DSB) by a RNA-guided DNA nuclease, this results in reduction or elimination of expression of the gene product encoded by the mutant allele of SAMD9L gene. In such embodiments, the SNP position in intron 4 is any one of rs2157743, rs61599939, or rs34330527. In such embodiments, the guide sequence portion comprises a sequence that is the same as or differs by no more than 1, 2, or 3 nucleotides from a sequence set forth in any of the SEQ ID NOs listed as targeting rs2157743, rs61599939, or rs34330527 in Table 1. Each possibility represents a separate embodiment. A person skilled in the art will appreciate that many splice acceptor sequences can be utilized such as in a non-limiting examples of such sequences include: YURAC(20-50 nucleotides)-C/T-C/T-C/T-A-G-Exon.

[0150] In some embodiments, the coding exon of a mutated allele of SAMD9L gene is completely or partially excised to reduce or eliminate expression of the mutant allele of the SAMD9L gene. In such embodiments at least two different guide sequence portions are utilized, for example, a first guide sequence portion that is discriminatory and targets only a mutated allele of the SAMD9L gene, and a second guide sequence portion that is non-discriminatory and targets both alleles of the SAMD9L gene.

[0151] In some embodiments, the first guide sequence portion is complementary to a target sequence in a SNP position located in intron 4 of the mutated allele of the SAMD9L gene, and the second guide sequence portion is complementary to a target sequence in the 3′ UTR or in the intergenic region of the SAMD9L gene. In such embodiments, the SNP position in intron 4 is any one of rs2157743, rs61599939, or rs34330527. In such embodiments, the first guide sequence portion comprises a sequence that is the same as or differs by no more than 1, 2, or 3 nucleotides from a sequence set forth in any of the SEQ ID NOs listed as targeting rs2157743, rs61599939, or rs34330527 in Table 1, and the second is the same as or differs by no more than 1, 2, or 3 nucleotides from a sequence set forth in any of the SEQ ID NOs listed as targeting 7:93130717-7:93131216, 7:93129556-7:93130056, or 7:93130068-7:93130567 in Table 1. Each possibility represents a separate embodiment.

[0152] In some embodiments, the first guide sequence portion is complementary to a target sequence in a SNP position located in intergenic region of the mutated allele of the SAMD9L gene, and the second guide sequence portion is complementary to a target sequence in intron 4 of the SAMD9L gene. In such embodiments, the SNP position in the intergenic region is any one of rs78002733, rs6964942, rs574912862, rs2374628, rs7786423, rs2374629, rs66986908, or rs6965114. In such embodiments, the first guide sequence portion comprises a sequence that is the same as or differs by no more than 1, 2, or 3 nucleotides from a sequence set forth in any of the SEQ ID NOs listed as targeting rs78002733, rs6964942, rs574912862, rs2374628, rs7786423, rs2374629, rs66986908, or rs6965114 in Table 1.

[0153] In some embodiments, the first guide sequence portion is complementary to a target sequence in a SNP position located in 3′ UTR of the mutated allele of the SAMD9L gene, and the second guide sequence portion is complementary to a target sequence in intron 4 of the SAMD9L gene. In such embodiments, the SNP position is any one of rs4267, rs71830352, rs10236444, 7:93130660_A_AGTGT, or rs4268. In such embodiments, the first guide sequence portion comprises a sequence that is the same as or differs by no more than 1, 2, or 3 nucleotides from a sequence set forth in any of the SEQ ID NOs: listed as targeting rs4267, rs71830352, rs10236444, 7:93130660_A_AGTGT, or rs4268 in Table 1.

[0154] In some embodiments, the polyadenylation signal (PolyAS) of SAMD9L gene of the mutated allele of the SAMD9L gene is completely or partially excised to destabilize the mutated allele to reduce or eliminate expression of the mutant allele.

[0155] In some embodiments, the first guide sequence portion is complementary to a target sequence in a SNP position located in 3′ UTR of the mutated allele of the SAMD9L gene, and the second guide sequence portion is complementary to a target sequence in the intergenic region of the SAMD9L gene. In such embodiments, the SNP position is any one of rs4267, rs71830352, rs10236444, 7:93130660_A_AGTGT, or rs4268. In such embodiments, the first guide sequence portion comprises a sequence that is the same as or differs by no more than 1, 2, or 3 nucleotides from a sequence set forth in any of the SEQ ID NOs: listed as targeting rs4267, rs71830352, rs10236444, 7:93130660_A_AGTGT, or rs4268.

[0156] In some embodiments, the first guide sequence portion is complementary to a target sequence in a SNP position located in intergenic region of the mutated allele of the SAMD9L gene, and the second guide sequence portion is complementary to a target sequence in the 3′ UTR of the SAMD9L gene. In such embodiments, the SNP position in the intergenic region is any one of rs78002733, rs6964942, rs574912862, rs2374628, rs7786423, rs2374629, rs66986908, or rs6965114. In such embodiments, the first guide sequence portion comprises a sequence that is the same as or differs by no more than 1, 2, or 3 nucleotides from a sequence set forth in any of the SEQ ID NOs: listed as targeting rs78002733, rs6964942, rs574912862, rs2374628, rs7786423, rs2374629, rs66986908, or rs6965114.

CRISPR nucleases and PAM recognition

[0157] In some embodiments, the sequence specific nuclease is selected from CRISPR nucleases, or a functional variant thereof. In some embodiments, the sequence specific nuclease is an RNA guided DNA nuclease. In such embodiments, the RNA sequence which guides the RNA guided DNA nuclease (e.g., Cpf1) binds to and/or directs the RNA guided DNA nuclease to the sequence comprising at least one nucleotide which differs between a mutated allele and its counterpart functional allele (e.g., SNP). In some embodiments, the CRISPR complex does not further comprise a tracrRNA. In a non-limiting example, in which the RNA guided DNA nuclease is a CRISPR protein, the at least one nucleotide which differs between the dominant mutated allele and the functional allele may be within the PAM site and/or proximal to the PAM site within the region that the RNA molecule is designed to hybridize to. A skilled artisan will appreciate that RNA molecules can be engineered to bind to a target of choice in a genome by commonly known methods in the art.

[0158] The term “PAM” as used herein refers to a nucleotide sequence of a target DNA located in proximity to the targeted DNA sequence and recognized by the CRISPR nuclease complex. The PAM sequence may differ depending on the nuclease identity. In addition, there are CRISPR nucleases that can target almost all PAMs. In some embodiments of the present invention, a CRISPR system utilizes one or more RNA molecules having a guide sequence portion to direct a CRISPR nuclease to a target DNA site via Watson-Crick base-pairing between the guide sequence portion and the protospacer on the target DNA site, which is next to the protospacer adjacent motif (PAM), which is an additional requirement for target recognition. The CRISPR nuclease then mediates cleavage of the target DNA site to create a double-stranded break within the protospacer. In a non-limiting example, a type II CRISPR system utilizes a mature crRNA:tracrRNA complex that directs the CRISPR nuclease, e.g. Cas9 to the target DNA the target DNA via Watson-Crick base-pairing between the guide sequence portion of the crRNA and the protospacer on the target DNA next to the protospacer adjacent motif (PAM). A skilled artisan will appreciate that each of the engineered RNA molecule of the present invention is further designed such as to associate with a target genomic DNA sequence of interest next to a protospacer adjacent motif (PAM), e.g., a PAM matching the sequence relevant for the type of CRISPR nuclease utilized, such as for a non-limiting example, NGG or NAG, wherein “N” is any nucleobase, for Streptococcus pyogenes Cas9 WT (SpCAS9); NNGRRT for Staphylococcus aureus (SaCas9); NNNVRYM for Jejuni Cas9 WT; NGAN or NGNG for SpCas9-VQR variant; NGCG for SpCas9-VRER variant; NGAG for SpCas9-EQR variant; NRRH for SpCas9-NRRH variant, wherein N is any nucleobase, R is A or G and H is A, C, or T; NRTH for SpCas9-NRTH variant, wherein N is any nucleobase, R is A or G and H is A, C, or T; NRCH for SpCas9-NRCH variant, wherein N is any nucleobase, R is A or G and H is A, C, or T; NG for SpG variant of SpCas9 wherein N is any nucleobase; NG or NA for SpCas9-NG variant of SpCas9 wherein N is any nucleobase; NR or NRN or NYN for SpRY variant of SpCas9, wherein N is any nucleobase, R is A or G and Y is C or T; NNG for Streptococcus canis Cas9 variant (ScCas9), wherein N is any nucleobase; NNNRRT for SaKKH-Cas9 variant of Staphylococcus aureus (SaCas9), wherein N is any nucleobase, and R is A or G; NNNNGATT for Neisseria meningitidis (NmCas9), wherein N is any nucleobase; TTN for Alicyclobacillus acidiphilus Cas12b (AacCas12b), wherein N is any nucleobase; or TTTV for Cpf1, wherein V is A, C or G. RNA molecules of the present invention are each designed to form complexes in conjunction with one or more different CRISPR nucleases and designed to target polynucleotide sequences of interest utilizing one or more different PAM sequences respective to the CRISPR nuclease utilized.

[0159] In some embodiments, an RNA-guided DNA nuclease e.g., a CRISPR nuclease, may be used to cause a DNA break, either double or single-stranded in nature, at a desired location in the genome of a cell. The most commonly used RNA-guided DNA nucleases are derived from CRISPR systems, however, other RNA-guided DNA nucleases are also contemplated for use in the genome editing compositions and methods described herein. For instance, see U.S. Publication No. 2015/0211023, incorporated herein by reference.

[0160] CRISPR systems that may be used in the practice of the invention vary greatly. CRISPR systems can be a type I, a type II, or a type III system. Non-limiting examples of suitable CRISPR proteins include Cas3, Cas4, Cas5, Cas5e (or CasD), Cas6, Cas6e, Cas6f, Cas7, Cas8al, Cas8a2, Cas8b, Cas8c, Cas9, Cas10, Cas1 Od, CasF, CasG, CasH, Csy1, Csy2, Csy3, Cse1 (or CasA), Cse2 (or CasB), Cse3 (or CasE), Cse4 (or CasC), Csc1, Csc2, Csa5, Csn2, Csm2, Csm3, Csm4, Csm5, Csm6, Cmr1, Cmr3, Cmr4, Cmr5, Cmr6, Csb1, Csb2, Csb3, Csx17, Csx14, Csx10, Csx16, CsaX, Csx3, Csz1, Csx15, Csf1, Csf2, Csf3, Csf4, and Cul966.

[0161] In some embodiments, the RNA-guided DNA nuclease is a CRISPR nuclease derived from a type II CRISPR system (e.g., Cas9). The CRISPR nuclease may be derived from Streptococcus pyogenes, Streptococcus thermophilus, Streptococcus sp., Staphylococcus aureus, Neisseria meningitidis, Treponema denticola, Nocardiopsis dassonvillei, Streptomyces pristinaespiralis, Streptomyces viridochromogenes, Streptomyces viridochromogenes, Streptosporangium roseum, Streptosporangium roseum, Alicyclobacillus acidocaldarius, Bacillus pseudomycoides, Bacillus selenitireducens, Exiguobacterium sibiricum, Lactobacillus delbrueckii, Lactobacillus salivarius, Microscilla marina, Burkholderiales bacterium, Polaromonas naphthalenivorans, Polaromonas sp., Crocosphaera watsonii, Cyanothece sp., Microcystis aeruginosa, Synechococcus sp., Acetohalobium arabaticum, Ammonifex degensii, Caldicelulosiruptor becscii, Candidatus Desulforudis, Clostridium botulinum, Clostridium Finegoldia magna, Natranaerobius thermophilus, Pelotomaculumthermopropionicum, Acidithiobacillus caldus, Acidithiobacillus ferrooxidans, Allochromatium vinosum, Marinobacter sp., Nitrosococcus halophilus, Nitrosococcus watsoni, Pseudoalteromonas haloplanktis, Ktedonobacter racemifer, Methanohalobium evestigatum, Anabaena variabilis, Nodularia spumigena, Nostoc sp., Arthrospira maxima, Arthrospira platensis, Arthrospira sp., Lyngbya sp., Microcoleus chthonoplastes, Oscillatoria sp., Petrotoga mobilis, Thermosipho africanus, Acaryochloris marina, or any species which encodes a CRISPR nuclease with a known PAM sequence. CRISPR nucleases encoded by uncultured bacteria may also be used in the context of the invention. (See Burstein et al. Nature, 2017). Variants of CRIPSR proteins having known PAM sequences e.g., SpCas9 D1135E variant, SpCas9 VQR variant, SpCas9 EQR variant, or SpCas9 VRER variant may also be used in the context of the invention.

[0162] Thus, an RNA guided DNA nuclease of a CRISPR system, such as a Cas9 protein or modified Cas9 or homolog or ortholog of Cas9, or other RNA guided DNA nucleases belonging to other types of CRISPR systems, such as Cpf1 and its homologs and orthologs, may be used in the compositions of the present invention. Additional CRISPR nucleases may also be used, for example, the nucleases described in PCT International Application Publication Nos. WO2020/223514 and WO2020/223553, which are hereby incorporated by reference.

[0163] In certain embodiments, the CRIPSR nuclease may be a “functional derivative” of a naturally occurring Cas protein. A “functional derivative” of a native sequence polypeptide is a compound having a qualitative biological property in common with a native sequence polypeptide. “Functional derivatives” include, but are not limited to, fragments of a native sequence and derivatives of a native sequence polypeptide and its fragments, provided that they have a biological activity in common with a corresponding native sequence polypeptide. A biological activity contemplated herein is the ability of the functional derivative to hydrolyze a DNA substrate into fragments. The term “derivative” encompasses both amino acid sequence variants of polypeptide, covalent modifications, and fusions thereof. Suitable derivatives of a Cas polypeptide or a fragment thereof include but are not limited to mutants, fusions, covalent modifications of Cas protein or a fragment thereof. Cas protein, which includes Cas protein or a fragment thereof, as well as derivatives of Cas protein or a fragment thereof, may be obtainable from a cell or synthesized chemically or by a combination of these two procedures. The cell may be a cell that naturally produces Cas protein, or a cell that naturally produces Cas protein and is genetically engineered to produce the endogenous Cas protein at a higher expression level or to produce a Cas protein from an exogenously introduced nucleic acid, which nucleic acid encodes a Cas that is same or different from the endogenous Cas. In some cases, the cell does not naturally produce Cas protein and is genetically engineered to produce a Cas protein.

[0164] In some embodiments, the CRISPR nuclease is Cpf1. Cpf1 is a single RNA-guided endonuclease which utilizes a T-rich protospacer-adjacent motif. Cpf1 cleaves DNA via a staggered DNA double-stranded break. Two Cpf1 enzymes from Acidaminococcus and Lachnospiraceae have been shown to carry out efficient genome-editing activity in human cells. (See Zetsche et al., 2015).

[0165] Thus, an RNA guided DNA nuclease of a Type II CRISPR System, such as a Cas9 protein or modified Cas9 or homologs, orthologues, or variants of Cas9, or other RNA guided DNA nucleases belonging to other types of CRISPR systems, such as Cpf1 and its homologs, orthologues, or variants, may be used in the present invention.

[0166] In some embodiments, the guide molecule comprises one or more chemical modifications which imparts a new or improved property (e.g., improved stability from degradation, improved hybridization energetics, or improved binding properties with an RNA guided DNA nuclease). Suitable chemical modifications include, but are not limited to: modified bases, modified sugar moieties, or modified inter-nucleoside linkages. Non-limiting examples of suitable chemical modifications include: 4-acetylcytidine, 5-(carboxyhydroxymethyl)uridine, 2′-O-methylcytidine, 5-carboxymethylaminomethyl-2-thiouridine, 5-carboxymethylaminomethyluridine, dihydrouridine, 2′-O- methylpseudouridine, “beta, D-galactosylqueuosine”, 2′-O-methylguanosine, inosine, N6-isopentenyladenosine, 1-methyladenosine, 1-methylpseudouridine, 1-methylguanosine, 1-methylinosine, “2,2-dimethylguanosine”, 2-methyladenosine, 2-methylguanosine, 3-methylcytidine, 5-methylcytidine, N6-methyladenosine, 7-methylguanosine, 5-methylaminomethyluridine, 5-methoxyaminomethyl-2-thiouridine, “beta, D-mannosylqueuosine”, 5-methoxycarbonylmethyl-2-thiouridine, 5-methoxycarbonylmethyluridine, 5-methoxy uridine, 2-methylthio-N6-isopentenyladenosine, N-((9-beta-D-ribofuranosyl-2-methylthiopurine-6-yl)carbamoyl)threonine, N-((9-beta-D-ribofuranosy purine-6-yl)N-methylcarbamoyl)threonine uridine-5-oxyacetic acid-methylester, uridine-5-oxyacetic acid, wybutoxosine, queuosine, 2-thiocytidine, 5-methyl-2-thiouridine, 2-thiouridine, 4-thiouridine, 5-methyluridine, N-((9-beta-D-ribofuranosylpurine-6-yl)-carbamoyl)threonine, 2′-O-methyl-5-methyluridine, 2′-O-methyluridine, wybutosine, “3-(3-amino-3-carboxy-propyl)uridine, (acp3)u”, 2′-0-methyl (M), 3′-phosphorothioate (MS), 3′-thioPACE (MSP), pseudouridine, or 1-methyl pseudo-uridine. Each possibility represents a separate embodiment of the present invention.

Guide Sequences which Specifically Target a Mutant Allele

[0167] A given gene may contain thousands of SNPs. Utilizing a 25 base pair target window for targeting each SNP in a gene would require hundreds of thousands of guide sequences. Any given guide sequence when utilized to target a SNP may result in degradation of the guide sequence, limited activity, no activity, or off-target effects. Accordingly, suitable guide sequences are necessary for targeting a given gene. By the present invention, a novel set of guide sequences have been identified for knocking out expression of a mutated SAMD9L protein, inactivating a mutant SAMD9L gene allele, and treating ATXPC syndrome.

[0168] The present disclosure provides guide sequences capable of specifically targeting a mutated allele for inactivation while leaving the functional allele unmodified. The guide sequences of the present invention are designed to, and are most likely to, specifically differentiate between a mutated allele and a functional allele. Of all possible guide sequences which target a mutated allele desired to be inactivated, the specific guide sequences disclosed herein are specifically effective to function with the disclosed embodiments.

[0169] Briefly, the guide sequences may have properties as follows: (1) target SNP/insertion/deletion/indel with a high prevalence in the general population, in a specific ethnic population or in a patient population is above 1% and the SNP/insertion/deletion/indel heterozygosity rate in the same population is above 1%; (2) target a location of a SNP/insertion/deletion/indel proximal to a portion of the gene e.g., within 5 k bases of any portion of the gene, for example, a promoter, a UTR, an exon or an intron; and (3) target a mutant allele using an RNA molecule which targets a founder or common pathogenic mutations for the disease/gene. In some embodiments, the prevalence of the SNP/insertion/deletion/indel in the general population, in a specific ethnic population or in a patient population is above 1%, 2%, 3%, 4%, 5%, 6%, 7%, 8%, 9%, 10%, 11%, 12%, 13%, 14%, or 15% and the SNP/insertion/deletion/indel heterozygosity rate in the same population is above 1%, 2%, 3%, 4%, 5%, 6%, 7%, 8%, 9%, 10%, 11%, 12%, 13%, 14%, or 15%. Each possibility represents a separate embodiment and may be combined at will.

[0170] For each gene, according to SNP/insertion/deletion/indel any one of the following strategies may be used to deactivate the mutated allele: (1) Knockout strategy using one RNA molecule—one RNA molecule is utilized to direct a CRISPR nuclease to a mutated allele and create a double-strand break (DSB) leading to formation of a frameshift mutation in an exon or in a splice site region of the mutated allele, or alternatively one RNA molecule is utilized to target an intron of a mutated allele leading to introduction of a synthetic splice donor by HDR (2) Excision of the coding exon using two RNA molecules, for example, a first RNA molecule targets a SNP position of an exon of the mutated allele and a second, non-discriminatory RNA molecule targets a sequence flanking the exon; (3) Excision of the polyadenylation signal using two RNA molecules, for example, a first RNA molecule targets a SNP position in the 3′UTR and a second, non-discriminatory RNA molecule targets a sequences downstream of the polyadenylation signal. Alternatively, the first RNA molecule targets a SNP position located downstream of the polyadenylation signal and the second, non-discriminatory RNA molecule targets a sequence upstream of the polyadenylation signal.

[0171] Based on the locations of identified SNPs/insertions/deletions/indels for each mutant allele, any one of, or a combination of, the above-mentioned methods to deactivate the mutant allele may be utilized.

[0172] In some embodiments of the present invention, one RNA molecule is used to target a SNP, and the location of the SNP is in an exon or in close proximity (e.g., within 20 base pairs) to a splice site between an intron and an exon. In some embodiments, two RNA molecules are used and may target two SNPs, such that the first SNP is upstream of the first exon e.g., within the 5′ untranslated region, within the promoter, or within the first two kilobases 5′ of the transcription start site, and the second SNP is downstream of the first SNP e.g., within the first two kilobases 5′ of the transcription start site, within an intron, or within an exon.

[0173] Guide sequences of the present invention may target a SNP in the upstream portion of the targeted gene, preferably upstream of the last exon of the targeted gene. Guide sequences may target a SNP upstream to the first exon, for example within the 5′ untranslated region, within the promoter, or within the first 4-5 kilobases 5′ of the transcription start site.

[0174] Guide sequences of the present invention may also target a SNP within close proximity (e.g., within 50 base pairs, more preferably with 20 base pairs) to a known protospacer adjacent motif (PAM) site.

[0175] Guide sequences of the present invention may: (1) target a heterozygous SNP for the targeted gene; (2) target a heterozygous SNP upstream or downstream of the gene; (3) target a SNP with a prevalence of the SNP/insertion/deletion/indel in the general population, in a specific ethnic population, or in a patient population above 1%; (4) have a guanine-cytosine content of greater than 30% and less than 85%; (5) have no repeat of four or more thymine/uracil or eight or more guanine, cytosine, or adenine; and (6) have low or no off-targeting identified by off-target analysis. Guide sequences of the present invention may satisfy any one of the above criteria and are most likely to differentiate between a mutated allele from its corresponding functional allele.

[0176] In some embodiments of the present invention, a SNP targeted by an RNA molecule may be upstream or downstream of the gene. In some embodiments of the present invention, the SNP is within 4,000 base pairs of the gene.

[0177] In some embodiments of the present invention, at least one nucleotide which differs between the mutated allele and the functional allele is upstream, downstream or within the sequence of the disease-causing mutation of the gene of interest. The at least one nucleotide which differs between the mutated allele and the functional allele may be within an exon or within an intron of the gene of interest. In some embodiments, the at least one nucleotide which differs between the mutated allele and the functional allele is within an exon of the gene of interest. In some embodiments, the at least one nucleotide which differs between the mutated allele and the functional allele is within an intron or the exon of the gene of interest, in close proximity to the splice site between the intron and the exon e.g., 1, 2, 3, 4, 5, 6, 7, 8, 9, 10, 11, 12, 13, 14, 15, 16, 17, 18, 19, 20, 21, 22, 23, 24, 25, 26, 27, 28, 29 or 30 nucleotides upstream or downstream to the splice site. Each possibility represents a separate embodiment.

[0178] In some embodiments, the at least one nucleotide is a single nucleotide polymorphism (SNP). In some embodiments, each of the nucleotide variants of the SNP may be expressed in the mutated allele. In some embodiments, the SNP may be a founder or common pathogenic mutation.

[0179] Guide sequences may target a SNP which has both (1) a high prevalence in the general population e.g., above 1% in the population; and (2) a high heterozygosity rate in the population, e.g., above 1%. Guide sequences may target a SNP that is globally distributed. A SNP may be a founder or common pathogenic mutation. In some embodiments, the prevalence in the general population is above 1%, 2%, 3%, 4%, 5%, 6%, 7%, 8%, 9%, 10%, 11%, 12%, 13%, 14%, or 15%. Each possibility represents a separate embodiment. In some embodiments, the heterozygosity rate in the population is above 1%, 2%, 3%, 4%, 5%, 6%, 7%, 8%, 9%, 10%, 11%, 12%, 13%, 14%, or 15%. Each possibility represents a separate embodiment.

[0180] In some embodiments, the at least one nucleotide which differs between the mutated allele and the functional allele is linked to/co-exists with the disease-causing mutation in high prevalence in a population. In such embodiments, “high prevalence” refers to at least 92%, 93%, 94%, 95%, 96%, 97%, 98%, 99%, or 100%. Each possibility represents a separate embodiment of the present invention. In one embodiment, the at least one nucleotide which differs between the mutated allele and the functional allele, is a disease-associated mutation. In some embodiments, the SNP is highly prevalent in the population. In such embodiments, “highly prevalent” refers to at least 10%, 11%, 12%, 13%, 14%, 15%, 20%, 30%, 40%, 50%, 60%, or 70% of a population. Each possibility represents a separate embodiment of the present invention.

### Delivery to Cells

[0181] The RNA molecule compositions described herein may be delivered to a target cell by any suitable means. RNA molecule compositions of the present invention may be targeted to any cell which contains and/or expresses a mutated allele, including any mammalian or plant cell. For example, in one embodiment the RNA molecule specifically targets a mutated SAMD9L allele and the target cell is an HSC. The delivery to the cell may be performed in-vitro, ex-vivo, or in-vivo. Further, the nucleic acid compositions described herein may be delivered as one or more of DNA molecules, RNA molecules, Ribonucleoproteins (RNP), nucleic acid vectors, or any combination thereof.

[0182] In some embodiments, the RNA molecule comprises a chemical modification. Non-limiting examples of suitable chemical modifications include 2′-0-methyl (M), 2′-0-methyl, 3′phosphorothioate (MS) or 2′-0-methyl, 3′thioPACE (MSP), pseudouridine, and 1-methyl pseudo-uridine. Each possibility represents a separate embodiment of the present invention.

[0183] Any suitable viral vector system may be used to deliver nucleic acid compositions e.g., the RNA molecule compositions of the subject invention. Conventional viral and non-viral based gene transfer methods can be used to introduce nucleic acids and target tissues. In certain embodiments, nucleic acids are administered for in vivo or ex vivo gene therapy uses. Non-viral vector delivery systems include naked nucleic acid, and nucleic acid complexed with a delivery vehicle such as a liposome or poloxamer. For a review of gene therapy procedures, see Anderson (1992); Nabel & Felgner (1993); Mitani & Caskey (1993); Dillon (1993); Miller (1992); Van Brunt (1988); Vigne (1995); Kremer & Perricaudet (1995); Haddada et al. (1995); and Yu et al. (1994).

[0184] Methods of non-viral delivery of nucleic acids and/or proteins include electroporation, lipofection, microinjection, biolistics, particle gun acceleration, virosomes, liposomes, immunoliposomes, lipid nanoparticles (LNPs), polycation or lipid:nucleic acid conjugates, artificial virions, and agent-enhanced uptake of nucleic acids or can be delivered to plant cells by bacteria or viruses (e.g., Agrobacterium, Rhizobium sp. NGR234, Sinorhizoboiummeliloti, Mesorhizobium loti, tobacco mosaic virus, potato virus X, cauliflower mosaic virus and cassava vein mosaic virus). (See, e.g., Chung et al., 2006). Sonoporation using, e.g., the Sonitron 2000 system (Rich-Mar), can also be used for delivery of nucleic acids. Cationic-lipid mediated delivery of proteins and/or nucleic acids is also contemplated as an in vivo, ex vivo, or in vitro delivery method. (See Zuris et al. (2015); see also Coelho et al. (2013); Judge et al. (2006); and Basha et al. (2011)).

[0185] Non-viral vectors, such as transposon-based systems e.g. recombinant Sleeping Beauty transposon systems or recombinant PiggyBac transposon systems, may also be delivered to a target cell and utilized for transposition of a polynucleotide sequence of a molecule of the composition or a polynucleotide sequence encoding a molecule of the composition in the target cell.

[0186] Additional exemplary nucleic acid delivery systems include those provided by Amaxa.RTM. Biosystems (Cologne, Germany), Maxcyte, Inc. (Rockville, Md.), BTX Molecular Delivery Systems (Holliston, Mass.) and Copernicus Therapeutics Inc., (see, e.g., U.S. Pat. No. 6,008,336). Lipofection is described in e.g., U.S. Pat. Nos. 5,049,386, 4,946,787; and 4,897,355, and lipofection reagents are sold commercially (e.g., Transfectam.™., Lipofectin.™. and Lipofectamine.™. RNAiMAX). Cationic and neutral lipids that are suitable for efficient receptor-recognition lipofection of polynucleotides include those disclosed in PCT International Publication Nos. WO/1991/017424 and WO/1991/016024. Delivery can be to cells (ex vivo administration) or target tissues (in vivo administration).

[0187] The preparation of lipid:nucleic acid complexes, including targeted liposomes such as immunolipid complexes, is well known to one of skill in the art (see, e.g., Crystal, Science (1995); Blaese et al., (1995); Behr et al., (1994); Remy et al. (1994); Gao and Huang (1995); Ahmad and Allen (1992); U.S. Pat. Nos. 4,186,183; 4,217,344; 4,235,871; 4,261,975; 4,485,054; 4,501,728; 4,774,085; 4,837,028; and 4,946,787).

[0188] Additional methods of delivery include the use of packaging the nucleic acids to be delivered into EnGenelC delivery vehicles (EDVs). These EDVs are specifically delivered to target tissues using bispecific antibodies where one arm of the antibody has specificity for the target tissue and the other has specificity for the EDV. The antibody brings the EDVs to the target cell surface and then the EDV is brought into the cell by endocytosis. Once in the cell, the contents are released (See MacDiarmid et al., 2009).

[0189] The use of RNA or DNA viral based systems for viral mediated delivery of nucleic acids take advantage of highly evolved processes for targeting a virus to specific cells in the body and trafficking the viral payload to the nucleus. Viral vectors can be administered directly to patients (in vivo) or they can be used to treat cells in vitro and the modified cells are administered to patients (ex vivo). Conventional viral based systems for the delivery of nucleic acids include, but are not limited to, retroviral, lentivirus, adenoviral, adeno-associated, vaccinia and herpes simplex virus vectors for gene transfer.

[0190] The tropism of a retrovirus can be altered by incorporating foreign envelope proteins, expanding the potential target population of target cells. Lentiviral vectors are retroviral vectors that are able to transduce or infect non-dividing cells and typically produce high viral titers. Selection of a retroviral gene transfer system depends on the target tissue. Retroviral vectors are comprised of cis-acting long terminal repeats with packaging capacity for up to 6-10 kb of foreign sequence. The minimum cis-acting LTRs are sufficient for replication and packaging of the vectors, which are then used to integrate the therapeutic gene into the target cell to provide permanent transgene expression. Widely used retroviral vectors include those based upon murine leukemia virus (MuLV), gibbon ape leukemia virus (GaLV), Simian Immunodeficiency virus (SIV), human immunodeficiency virus (HIV), and combinations thereof (See, e.g., Buchschacher et al. (1992); Johann et al. (1992); Sommerfelt et al. (1990); Wilson et al. (1989); Miller et al. (1991); PCT International Publication No. WO/1994/026877A1).

[0191] At least six viral vector approaches are currently available for gene transfer in clinical trials, which utilize approaches that involve complementation of defective vectors by genes inserted into helper cell lines to generate the transducing agent.

[0192] pLASN and MFG-S are examples of retroviral vectors that have been used in clinical trials (See Dunbar et al., 1995; Kohn et al., 1995; Malech et al., 1997). PA317/pLASN was the first therapeutic vector used in a gene therapy trial (Blaese et al., 1995). Transduction efficiencies of 50% or greater have been observed for MFG-S packaged vectors. (Ellem et al., (1997); Dranoff et al., 1997).

[0193] Packaging cells are used to form virus particles that are capable of infecting a host cell. Such cells include 293 cells, which package adenovirus, AAV, and Psi-2 cells or PA317 cells, which package retrovirus. Viral vectors used in gene therapy are usually generated by a producer cell line that packages a nucleic acid vector into a viral particle. The vectors typically contain the minimal viral sequences required for packaging and subsequent integration into a host (if applicable), other viral sequences being replaced by an expression cassette encoding the protein to be expressed. The missing viral functions are supplied in trans by the packaging cell line. For example, AAV vectors used in gene therapy typically only possess inverted terminal repeat (ITR) sequences from the AAV genome which are required for packaging and integration into the host genome. Viral DNA is packaged in a cell line, which contains a helper plasmid encoding the other AAV genes, namely rep and cap, but lacking ITR sequences. The cell line is also infected with adenovirus as a helper. The helper virus promotes replication of the AAV vector and expression of AAV genes from the helper plasmid. The helper plasmid is not packaged in significant amounts due to a lack of ITR sequences. Contamination with adenovirus can be reduced by, e.g., heat treatment to which adenovirus is more sensitive than AAV. Additionally, AAV can be produced at clinical scale using baculovirus systems (see U.S. Pat. No. 7,479,554).

[0194] In many gene therapy applications, it is desirable that the gene therapy vector be delivered with a high degree of specificity to a particular tissue type. Accordingly, a viral vector can be modified to have specificity for a given cell type by expressing a ligand as a fusion protein with a viral coat protein on the outer surface of the virus. The ligand is chosen to have affinity for a receptor known to be present on the cell type of interest. For example, Han et al. (1995) reported that Moloney murine leukemia virus can be modified to express human heregulin fused to gp70, and the recombinant virus infects certain human breast cancer cells expressing human epidermal growth factor receptor. This principle can be extended to other virus-target cell pairs, in which the target cell expresses a receptor and the virus expresses a fusion protein comprising a ligand for the cell-surface receptor. For example, filamentous phage can be engineered to display antibody fragments (e.g., FAB or Fv) having specific binding affinity for virtually any chosen cellular receptor. Although the above description applies primarily to viral vectors, the same principles can be applied to nonviral vectors. Such vectors can be engineered to contain specific uptake sequences which favor uptake by specific target cells.

[0195] Gene therapy vectors can be delivered in vivo by administration to an individual patient, typically by systemic administration (e.g., intravitreal, intravenous, intraperitoneal, intramuscular, subdermal, or intracranial infusion) or topical application, as described below. Alternatively, vectors can be delivered to cells ex vivo, such as cells explanted from an individual patient (e.g., lymphocytes, bone marrow aspirates, tissue biopsy) or universal donor hematopoietic stem cells, followed by reimplantation of the cells into a patient, optionally after selection for cells which have incorporated the vector. A non-limiting exemplary ex vivo approach may involve removal of tissue (e.g., peripheral blood, bone marrow, and spleen) from a patient for culture, nucleic acid transfer to the cultured cells (e.g., hematopoietic stem cells), followed by grafting the cells to a target tissue (e.g., bone marrow, and spleen) of the patient. In some embodiments, the stem cell or hematopoietic stem cell may be further treated with a viability enhancer.

[0196] Ex vivo cell transfection for diagnostics, research, or for gene therapy (e.g., via re-infusion of the transfected cells into the host organism) is well known to those of skill in the art. In a preferred embodiment, cells are isolated from the subject organism, transfected with a nucleic acid composition, and re-infused back into the subject organism (e.g., patient). Various cell types suitable for ex vivo transfection are well known to those of skill in the art (See, e.g., Freshney, “Culture of Animal Cells, A Manual of Basic Technique and Specialized Applications (6th edition, 2010) and the references cited therein for a discussion of how to isolate and culture cells from patients).

[0197] Suitable cells include, but are not limited to, eukaryotic cells and/or cell lines. Non-limiting examples of such cells or cell lines generated from such cells include COS, CHO (e.g., CHO-S, CHO-K1, CHO-DG44, CHO-DUXB11, CHO-DUKX, CHOK1SV), VERO, MDCK, WI38, V79, B14AF28-G3, BHK, HaK, NSO, SP2/0-Ag14, HeLa, HEK293 (e.g., HEK293-F, HEK293-H, HEK293-T), perC6 cells, any plant cell (differentiated or undifferentiated), as well as insect cells such as Spodopterafugiperda (Sf), or fungal cells such as Saccharomyces, Pichia and Schizosaccharomyces. In certain embodiments, the cell line is a CHO-K1, MDCK or HEK293 cell line. Additionally, primary cells may be isolated and used ex vivo for reintroduction into the subject to be treated following treatment with a guided nuclease system (e.g. CRISPR/Cas). Suitable primary cells include peripheral blood mononuclear cells (PBMC), and other blood cell subsets such as, but not limited to, CD4+ T cells or CD8+ T cells. Suitable cells also include stem cells such as, by way of example, embryonic stem cells, induced pluripotent stem cells, hematopoietic stem cells (CD34+), neuronal stem cells and mesenchymal stem cells.

[0198] In one embodiment, stem cells are used in ex vivo procedures for cell transfection and gene therapy. The advantage to using stem cells is that they can be differentiated into other cell types in vitro, or can be introduced into a mammal (such as the donor of the cells) where they will engraft in the bone marrow. Methods for differentiating CD34+ cells in vitro into clinically important immune cell types using cytokines such a GM-CSF, IFN-gamma, and TNF-alpha are known (as a non-limiting example see, Inaba et al., 1992).

[0199] Stem cells are isolated for transduction and differentiation using known methods. For example, stem cells are isolated from bone marrow cells by panning the bone marrow cells with antibodies which bind unwanted cells, such as CD4+ and CD8+ (T cells), CD45+(panB cells), GR-1 (granulocytes), and Tad (differentiated antigen presenting cells) (as a non-limiting example, see Inaba et al., 1992). Stem cells that have been modified may also be used in some embodiments.

[0200] Vectors (e.g., retroviruses, liposomes, etc.) containing therapeutic nucleic acid compositions can also be administered directly to an organism for transduction of cells in vivo. Administration is by any of the routes normally used for introducing a molecule into ultimate contact with blood or tissue cells including, but not limited to, injection, infusion, topical application (e.g., eye drops and cream) and electroporation. Suitable methods of administering such nucleic acids are available and well known to those of skill in the art, and, although more than one route can be used to administer a particular composition, a particular route can often provide a more immediate and more effective reaction than another route. According to some embodiments, the composition is delivered via IV injection.

[0201] Vectors suitable for introduction of transgenes into immune cells (e.g., T-cells) include non-integrating lentivirus vectors. See, e.g., U.S. Publication No. 2009/0117617.

[0202] Pharmaceutically acceptable carriers are determined in part by the particular composition being administered, as well as by the particular method used to administer the composition. Accordingly, there is a wide variety of suitable formulations of pharmaceutical compositions available, as described below (See, e.g., Remington's Pharmaceutical Sciences, 17th ed., 1989).

[0203] In accordance with some embodiments, there is provided an RNA molecule which binds to/associates with and/or directs the RNA guided DNA nuclease to a sequence comprising at least one nucleotide which differs between a mutated allele and a functional allele (e.g., SNP) of a gene of interest (i.e., a sequence of the mutated allele which is not present in the functional allele). The sequence may be within the disease associated mutation. The sequence may be upstream or downstream to the disease associated mutation. Any sequence difference between the mutated allele and the functional allele may be targeted by an RNA molecule of the present invention to inactivate the mutant allele, or otherwise disable its dominant disease-causing effects, while preserving the activity of the functional allele.

[0204] The disclosed compositions and methods may also be used in the manufacture of a medicament for treating dominant genetic disorders in a patient.

### Mechanisms of Action for SAMD9L Knockout Methods

[0205] Without being bound by any theory or mechanism, the instant invention may be utilized to apply a CRISPR nuclease to process a mutated pathogenic SAMD9L allele and not a functional SAMD9L allele, such as to prevent expression of the mutated pathogenic allele or to produce a truncated non-pathogenic peptide from the mutated pathogenic allele, in order to prevent ATXPC syndrome. A specific guide sequence may be selected from Table 1 based on the targeted SNP and the type of CRISPR nuclease used (required PAM sequence).

[0206] The SAMD9L gene is located in chromosome 7 and encodes the SAMD9L protein. One optional strategy to knockout a mutated SAMD9L mutated allele is to truncate SAMD9L by targeting a SNP position in a coding exon of SAMD9L using one RNA molecule. Truncation may also be achieved by excision of an exon using two RNA molecules, wherein one of the RNA molecules targets an allele specific sequence in a SNP position and the other RNA molecule is a non-discriminatory guide that targets a sequence flanking the coding exon. Another optional strategy to knockout SAMD9L is by excision of its polyadenylation signal using a first RNA molecule to target a SNP position in the 3′UTR and a second, non-discriminatory RNA to target downstream of the polyadenylation signal. Alternatively, excision of the SAMD9L polyadenylation signal may be performed by using a first RNA molecule to target a SNP position located downstream of the polyadenylation signal and a second, non-discriminatory RNA molecule to target a sequence upstream of the polyadenylation signal. Excision of a portion of a mutated SAMD9L allele may also be achieved by mediating a DSB in an intron flanking the desired exon and a region downstream of the desired exon. Yet another optional strategy is to introduce by HDR a synthetic splice acceptor site in Intron 4, such that the coding exon is no longer expressed.

[0207] In a non-limiting example, excision of the SAMD9L protein-encoding exon may be achieved by utilizing a first discriminatory RNA molecule that targets a SNP position in Intron 4, the 3′UTR, or an intergenic region (e.g., rs2157743, rs4267 and rs6964942, respectively) of a SAMD9L mutated allele, and a second non-discriminatory RNA molecule that targets a sequence in Intron 4, the 3′UTR, or an intergenic region of SAMD9L that is chosen according to the location of the SNP position targeted by the first RNA molecule, such that the combined use of the first and second RNA molecules mediates excision of the coding exon in the SAMD9L mutated allele.

[0208] Another optional strategy is to inhibit the expression of a SAMD9L mutated allele by excision of the polyadenylation signal in the 3′UTR region to destabilize the expression of the mutated allele. In a non-limiting example, excision of the polyadenylation signal may be achieved by using a first discriminatory RNA molecule to target a SNP position in the 3′ UTR of the mutated allele (e.g. rs4267 or rs2374628), and a second non-discriminatory RNA molecule to target a sequence downstream to the polyadenylation signal (e.g. in an intergenic region). Alternatively, a first discriminatory RNA molecule may be used to target a SNP position in an intergenic region (e.g. rs6964942) of the mutated allele, and a second non-discriminatory RNA molecule to target a sequence in the 3′UTR upstream of the polyadenylation sequence.

[0209] Another optional strategy is to introduce a frameshift in a mutated SAMD9L allele by utilizing one RNA molecule to target a SNP position (e.g. rs1133906, rs10488532 and rs1029357) in the coding exon of the mutated SAMD9L to mediate a double-strand break, which would lead to expression of a truncated protein or nonsense mediated decay (NMD).

### Examples of RNA Guide Sequences which Specifically Target Mutated Alleles of SAMD9L Gene

[0210] Disclosures which include sequences that may interact with a SARM1 sequence in some form include PCT International Application Publication Nos. WO2020/191171, WO2018/154412, WO2019/081982, WO2006/096473, WO2018/154387, WO2018/007976, WO2017/182881, Japanese Application Publication No. 2006/515742, and U.S. Publication No. 2020/0299786, each of which are hereby incorporated by reference. Although a large number of guide sequences can be designed to target a mutated allele, the nucleotide sequences described in Tables 2 identified by SEQ ID NOs: 1-20246 below were specifically selected to effectively implement the methods set forth herein and to effectively discriminate between alleles.

[0211] Table 1 shows guide sequences designed for use as described in the embodiments above to associate with different SNPs or pathogenic mutations within a sequence of a mutated SAMD9L allele. Each engineered guide molecule is further designed such as to associate with a target genomic DNA sequence of interest that lies next to a protospacer adjacent motif (PAM), e.g., a PAM matching the sequence NGG or NAG, where “N” is any nucleobase. The guide sequences were designed to work in conjunction with one or more different CRISPR nucleases, including, but not limited to, e.g. SpCas9WT (PAM SEQ: NGG), SpCas9.VQR.1 (PAM SEQ: NGAN), SpCas9.VQR.2 (PAM SEQ: NGNG), SpCas9.EQR (PAM SEQ: NGAG), SpCas9.VRER (PAM SEQ: NGCG), SaCas9WT (PAM SEQ: NNGRRT), SpRY (PAM SEQ: NRN or NYN), NmCas9WT (PAM SEQ: NNNNGATT), Cpf1 (PAM SEQ: TTTV), or JeCas9WT (PAM SEQ: NNNVRYM). RNA molecules of the present invention are each designed to form complexes in conjunction with one or more different CRISPR nucleases and designed to target polynucleotide sequences of interest utilizing one or more different PAM sequences respective to the CRISPR nuclease utilized.

TABLE 1
Guide sequence portions designed to associate with specific SAMD9L gene targets

| | SEQ ID NOs: of | SEQ ID NOs: | SEQ ID NOs: of |
|---|---|---|---|
| | 20-nucleotide | of 21-nucleotide | 22-nucleotide |
| | guide sequence | guide sequence | guide sequence |
| Target | portions | portions | portions |
| 7:93131324_A_G | 1-48 | 49-96 | 97-147 |
| 7:93131411_G_C | 148-193 | 194-239 | 240-285 |
| 7:93131438_C_T | 286-315 | 316-345 | 346-375 |
| 7:93131495_T_C | 376-427 | 428-481 | 482-537 |
| 7:93132080_G_C | 538-589 | 590-643 | 644-699 |
| 7:93132130_C_T | 700-751 | 752-805 | 806-861 |
| 7:93132385_C_G | 862-913 | 914-967 | 968-1023 |
| 7:93132434_A_T | 1024-1075 | 1076-1129 | 1130-1185 |
| 7:93132530_C_G | 1186-1237 | 1238-1291 | 1292-1347 |
| 7:93132545_T_C | 1348-1399 | 1400-1453 | 1454-1509 |
| 7:93132619_T_C | 1510-1561 | 1562-1615 | 1616-1671 |
| 7:93132872_C_A | 1672-1723 | 1724-1773 | 1774-1827 |
| 7:93133009_A_G | 1828-1879 | 1880-1933 | 1934-1989 |
| 7:93133016_G_A | 1990-2041 | 2042-2095 | 2096-2151 |
| 7:93133016_G_T | 1990-1991, | 2042, 2049, | 2096, 2102, |
| | 1997, 2000, | 2052, 2057, | 2104,2107, |
| | 2005, 2008- | 2061, 2064, | 2112,2119, |
| | 2009, 2014, | 2066, 2068, | 2121,2123, |
| | 2020, 2022, | 2074, 2076, | 2129-2130, |
| | 2024,2034, | 2078, 2088, | 2132,2134, |
| | 2152-2191 | 2192-2233 | 2234-2277 |
| 7:93133300_A_G | 2278-2329 | 2330-2383 | 2384-2439 |
| 7:93133332_G_T | 2440-2491 | 2492-2545 | 2546-2601 |
| 7:93133453_A_T | 2602-2653 | 2654-2706 | 2707-2761 |
| 7:93133790_A_G | 2762-2813 | 2814-2866 | 2867-2922 |
| 7:93133858_TA_CT | 2923-2974 | 2975-3028 | 3029-3084 |
| 7:93133907_G_A | 3085-3136 | 3137-3190 | 3191-3246 |
| 7:93134063_C_A | 3247-3298 | 3299-3352 | 3353-3408 |
| 7:93134063_C_T | 3247, 3257, | 3309, 3312, | 3359, 3364, |
| | 3260, 3265, | 3322, 3324, | 3367,3377- |
| | 3270, 3277, | 3330, 3334, | 3378, 3380, |
| | 3281, 3283, | 3336, 3338, | 3386, 3390, |
| | 3285, 3287, | 3340-3341, | 3392, 3394, |
| | 3289, 3292, | 3343, 3346, | 3397, 3402, |
| | 3409-3448 | 3449-3490 | 3491-3534 |
| 7:93134095_G_A | 3535-3586 | 3587-3640 | 3641-3696 |
| 7:93134423_A_T | 3697-3748 | 3749-3802 | 3803-3858 |
| 7:93134973_C_A | 3859-3886 | 3887-3902 | 3903-3923 |
| 7:93134973_C_G | 3864, 3866, | 3888, 3890, | 3903, 3905, |
| | 3870-3871, | 3892, 3894, | 3907, 3909, |
| | 3873, 3876, | 3898, 3901, | 3912, 3915, |
| | 3880-3881, | 3964-3989 | 3919, 3990- |
| | 3924-3963 | | 4019 |
| 7:93134993_T_C | 4020-4067 | 4068-4110 | 4111-4158 |
| 7:93135232_C_G | 4159-4210 | 4211-4264 | 4265-4320 |
| 7:93135268_CC_GA | 4321-4372 | 4373-4426 | 4427-4482 |
| 7:93135269_C_T | 4341, 4344- | 4381, 4394, | 4435, 4445, |
| | 4345,4351, | 4397-4398, | 4449,4452- |
| | 4355,4362, | 4404, 4409, | 4453, 4459, |
| | 4364, 4368, | 4415, 4421, | 4464, 4470, |
| | 4371-4372, | 4425-4426, | 4477, 4481, |
| | 4483-4524 | 4525-4568 | 4569-4614 |
| 7:93135313_T_C | 4615-4666 | 4667-4720 | 4721-4776 |
| 7:93135314_C_T | 4619, 4624, | 4671, 4675- | 4725, 4729- |
| | 4629, 4634, | 4676, 4681, | 4730, 4735, |
| | 4637, 4640, | 4686, 4689, | 4744, 4747, |
| | 4644,4647, | 4692, 4699, | 4754, 4763, |
| | 4654, 4665, | 4706, 4708, | 4766, 4773, |
| | 4777-4818 | 4819-4862 | 4863-4908 |
| 7:93135604_G_A | 4909-4960 | 4961-5009 | 5010-5064 |
| 7:93135805_A_G | 5065-5116 | 5117-5170 | 5171-5226 |
| 7:93135822_TAA_ACT | 5227-5278 | 5279-5332 | 5333-5388 |
| 7:93135822_TAA_GCT | 5228, 5232, | 5280, 5284, | 5334, 5338, |
| | 5235, 5241, | 5287, 5293, | 5343, 5348, |
| | 5244, 5246- | 5296, 5298- | 5351, 5353- |
| | 5247, 5258, | 5300, 5313, | 5356, 5369, |
| | 5264, 5272, | 5318, 5330, | 5374, 5388, |
| | 5276, 5278, | 5332, 5429- | 5471-5514 |
| | 5389-5428 | 5470 | |
| 7:93135823_A_G | 5228, 5232, | 5280, 5284, | 5334, 5343, |
| | 5241, 5244, | 5293, 5298- | 5348, 5353- |
| | 5246, 5264, | 5299, 5313, | 5355, 5369, |
| | 5272, 5276, | 5318, 5330, | 5374, 5388, |
| | 5278, 5515- | 5332, 5558- | 5603-5649 |
| | 5557 | 5602 | |
| 7:93127382_A_T | 5650-5663 | 5664-5677 | 5678-5691 |
| rs78002733_REF | | | |
| 7:93127827_A_T | 5692-5743 | 5744-5797 | 5798-5853 |
| rs6964942_REF | | | |
| 7:93127827_A_T | 5692, 5695, | 5760, 5762- | 5816-5817, |
| rs6964942_SNP | 5708, 5710- | 5763, 5766, | 5820, 5824, |
| | 5711, 5714, | 5770, 5777, | 5835-5836, |
| | 5718, 5725, | 5781-5782, | 5841, 5844- |
| | 5729, 5734, | 5787, 5790, | 5845, 5848, |
| | 5737, 5740, | 5793, 5796, | 5851, 5853, |
| | 5854-5893 | 5894-5935 | 5936-5979 |
| 7:93127920_A_T | 5980-6031 | 6032-6081 | 6082-6135 |
| rs6965114_REF | | | |
| 7:93127920_A_T | 5995, 6007, | 6045, 6057, | 6108, 6110, |
| rs6965114_SNP | 6009, 6011, | 6059, 6061, | 6112, 6114, |
| | 6013, 6136- | 6063, 6077, | 6129, 6135, |
| | 6158 | 6159-6180 | 6181-6210 |
| 7:93128125_C_CA | 6211-6225 | 6226-6240 | 6241-6257 |
| rs574912862_REF | | | |
| 7:93128125_C_CA | 6213, 6215, | 6226, 6231, | 6241, 6246- |
| rs574912862_SNP | 6219, 6221, | 6236, 6267- | 6247, 6277- |
| | 6258-6266 | 6276 | 6288 |
| 7:93128640_C_T | 6289-6340 | 6341-6394 | 6395-6450 |
| rs66986908_REF | | | |
| 7:93128640_C_T | 6297, 6299, | 6349, 6351, | 6403, 6405, |
| rs66986908_SNP | 6301, 6304, | 6353, 6355, | 6407, 6409, |
| | 6318, 6323, | 6359, 6372, | 6413,6415, |
| | 6325, 6329, | 6377, 6383, | 6427, 6430, |
| | 6331-6332, | 6385-6386, | 6439, 6441, |
| | 6339-6340, | 6393-6394, | 6449-6450, |
| | 6451-6490 | 6491-6532 | 6533-6576 |
| 7:93128873_C_T | 6577-6618 | 6619-6660 | 6661-6708 |
| rs2374628_REF | | | |
| 7:93128873_C_T | 6586-6588, | 6628-6631, | 6671-6674, |
| rs2374628_SNP | 6590, 6612, | 6656, 6742- | 6676, 6689, |
| | 6709-6741 | 6768 | 6706, 6769- |
| | | | 6799 |
| 7:93129097_T_A | 6800-6827 | 6828-6859 | 6860-6897 |
| rs7786423_REF | | | |
| 7:93129097_T_A | 6815, 6820, | 6840, 6842, | 6874, 6878- |
| rs7786423_SNP | 6823-6824, | 6846, 6854- | 6879, 6881, |
| | 6898-6923 | 6855, 6924- | 6889-6890, |
| | | 6952 | 6897, 6953- |
| | | | 6985 |
| 7:93129244_G_A | 6986-7037 | 7038-7091 | 7092-7147 |
| rs2374629_REF | | | |
| 7:93129244_G_A | 6986-6987, | 7038, 7047, | 7101, 7104, |
| rs2374629_SNP | 6991, 6995, | 7050, 7052, | 7106-7107, |
| | 6998, 7000, | 7056, 7061, | 7111, 7116, |
| | 7004, 7011, | 7064, 7068, | 7119, 7126, |
| | 7015, 7025, | 7078, 7080- | 7134, 7136- |
| | 7027-7028, | 7082, 7188- | 7138, 7230- |
| | 7148-7187 | 7229 | 7273 |
| 7:93130149_A_G | 7274-7325 | 7326-7379 | 7380-7435 |
| rs4267_REF | | | |
| 7:93130149_A_G | 7277, 7279, | 7327, 7330, | 7381, 7384, |
| rs4267_SNP | 7285, 7287, | 7332, 7338- | 7386, 7392- |
| | 7292, 7294, | 7339, 7341, | 7393, 7400, |
| | 7299, 7303, | 7346, 7348, | 7402, 7410, |
| | 7308, 7310, | 7357, 7362, | 7412, 7417, |
| | 7318, 7320, | 7364, 7372, | 7419, 7423, |
| | 7436-7475 | 7476-7517 | 7518-7561 |
| 7:93130660_AGTGTGTGT_A | 7562-7590 | 7591-7620 | 7621-7650 |
| rs71830352_REF | | | |
| 7:93130660_AGT_A | 7562-7590 | 7591-7620 | 7621-7650 |
| rs71830352_REF | | | |
| 7:93130660_A_AGTGT | 7562-7590 | 7591-7620 | 7621-7650 |
| REF | | | |
| 7:93130660_A_AGT | 7562-7590 | 7591-7620 | 7621-7650 |
| rs71830352_REF | | | |
| 7:93130756_A_G | 7651-7702 | 7703-7754 | 7755-7810 |
| rs10236444_REF | | | |
| 7:93130756_A_G | 7654, 7658- | 7706, 7711, | 7758, 7763, |
| rs10236444_SNP | 7659, 7668, | 7713, 7720, | 7765, 7779, |
| | 7671, 7674, | 7723, 7726, | 7781, 7783, |
| | 7676, 7678, | 7728, 7730, | 7787-7790, |
| | 7682-7683, | 7734-7736, | 7795, 7802, |
| | 7694, 7696, | 7747, 7851- | 7893-7936 |
| | 7811-7850 | 7892 | |
| 7:93131189_G_A | 7937-7968 | 7969-7992 | 7993-8018 |
| rs4268_REF | | | |
| 7:93131189_G_A | 7941-7942, | 7973-7975, | 7997-7998, |
| rs4268_SNP | 7948, 7951, | 7979, 7981, | 8003, 8005, |
| | 7954, 7965, | 7990, 8035- | 8011, 8016, |
| | 8019-8034 | 8048 | 8049-8064 |
| 7:93131425_T_G | 8065-8087 | 8088-8110 | 8111-8133 |
| rs10282508_REF | | | |
| 7:93131425_T_G | 8070-8072, | 8093-8095, | 8116-8119, |
| rs10282508_SNP | 8075, 8077, | 8098, 8100, | 8122, 8124- |
| | 8079-8082, | 8102-8106, | 8125, 8127- |
| | 8084, 8087, | 8108, 8148- | 8128, 8130, |
| | 8134-8147 | 8161 | 8133, 8162- |
| | | | 8175 |
| 7:93133368_A_G | 8176-8227 | 8228-8281 | 8282-8337 |
| rs1029357_REF | | | |
| 7:93133368_A_G | 8180, 8184, | 8232, 8236, | 8286, 8290, |
| rs1029357_SNP | 8187, 8193, | 8239, 8245, | 8293, 8299, |
| | 8197,8205, | 8248, 8250, | 8302, 8304, |
| | 8216-8217, | 8258, 8267, | 8308, 8313, |
| | 8221-8222, | 8275-8276, | 8322, 8328, |
| | 8224-8225, | 8278-8279, | 8334-8335, |
| | 8338-8377 | 8378-8419 | 8420-8463 |
| 7:93135176_C_T | 8464-8514 | 8515-8556 | 8557-8603 |
| rs10488532_REF | | | |
| 7:93135176_C_T | 8476, 8483- | 8519, 8530- | 8557, 8562, |
| rs10488532_SNP | 8485, 8491- | 8531, 8537- | 8575-8576, |
| | 8493, 8497, | 8539, 8545, | 8583-8584, |
| | 8501, 8504, | 8548, 8634- | 8591, 8594, |
| | 8507, 8604- | 8657 | 8598, 8658- |
| | 8633 | | 8685 |
| 7:93135669_C_T | 8686-8737 | 8738-8791 | 8792-8847 |
| rs1133906_REF | | | |
| 7:93135669_C_T | 8687, 8689, | 8739, 8741, | 8793, 8795, |
| rs1133906_SNP | 8692, 8696, | 8744, 8748, | 8798, 8807, |
| | 8701, 8707- | 8753, 8760, | 8814, 8817, |
| | 8708, 8711, | 8763,8773, | 8827, 8829, |
| | 8729, 8732, | 8775, 8786, | 8835-8836, |
| | 8735, 8737, | 8789, 8791, | 8845, 8847, |
| | 8848-8859 | 8860-8871 | 8872-8883 |
| 7:93137734_GTTT_G | 8884-8904 | 8905-8926 | 8927-8950 |
| rs61599939_REF | | | |
| 7:93137734_GTT_G | 8884-8904 | 8905-8926 | 8927-8950 |
| rs61599939_REF | | | |
| 7:93137734_GT_G | 8884-8904 | 8905-8926 | 8927-8950 |
| rs61599939_REF | | | |
| 7:93138189_T_C | 8951-9002 | 9003-9056 | 9057-9112 |
| rs2157743_REF | | | |
| 7:93138189_T_C | 8955, 8958, | 9003, 9008, | 9057, 9062, |
| rs2157743_SNP | 8962, 8964, | 9011-9012, | 9065-9066, |
| | 8968, 8972- | 9016, 9018, | 9072, 9081, |
| | 8973, 8978, | 9026-9027, | 9086, 9088- |
| | 8980-8981, | 9032, 9034- | 9089, 9095, |
| | 8989, 8996, | 9035, 9050, | 9097, 9106, |
| | 9113-9152 | 9153-9194 | 9195-9238 |
| 7:93138431_T_TCA | 9239-9254 | 9255-9268 | 9269-9280 |
| rs34330527_REF | | | |
| 7:93130717-7:93131216 | 7651-7702, | 7703-7754, | 7755-7810, |
| (Downstream to stop codon) | 7937-7968, | 7969-7992, | 7993-8018, |
| | 9281-10146 | 10147-11018 | 11019-11882 |
| 7:93129556-7:93130056 | 11883-12834 | 12835-13784 | 13785-14732 |
| (Intergenic) | | | |
| 7:93135992-7:93136491 | 14733-15676 | 15677-16620 | 16621-17564 |
| (Intron 4) | | | |
| 7:93130068-7:93130567 | 7274-7325, | 7326-7379, | 7380-7435, |
| (Upstream to polyadenylation | 17565-18462 | 18463-19356 | 19357-20246 |
| signal) | | | |

The indicated locations listed in column 1 of the Table 1 are based on gnomAD v3.1 database and UCSC Genome Browser assembly ID: hg38, Sequencing/Assembly provider ID: Genome Reference Consortium Human GRCh38.p12 (GCA_000001405.27). Assembly date: December 2013 initial release; December 2017 patch release 12.
The SNP details are indicated by the listed SNP ID Nos. (“rs numbers”), which are based on the NCBI 2018 database of Single Nucleotide Polymorphisms (dbSNP)). The indicated DNA mutations are associated with Transcript Consequence NM_152703 as obtained from NCBI RefSeq genes.

[0212] Examples are provided below to facilitate a more complete understanding of the invention. The following examples illustrate the exemplary modes of making and practicing the invention. However, the scope of the invention is not limited to specific embodiments disclosed in these Examples, which are for purposes of illustration only.

### EXPERIMENTAL DETAILS

### Example 1: SAMD9L Correction Anaylsis

[0213] Guide sequences comprising 17-50 contiguous nucleotides containing nucleotides in the sequence set forth in any one of SEQ ID NOs: 1-20246 are screened for high on target activity using SpCas9 in HeLa cells. On target activity is determined by DNA capillary electrophoresis analysis.

### Example 2: Additional SAMD9L Editing Analysis

[0214] Gain-of-function mutations in SAMD9L cause cytopenia, immunodeficiency, variable neurological presentation, and predisposition to myelodysplastic syndromes (MDS) with −7/del (7q). To choose optimal RNA guide molecules for mutant allele elimination using a one-guide molecule strategy, which targets SNPs residing in the gene leading to protein truncation, or a two-guide molecule strategy deleting the full gene or 3′UTR SAMD9L, 18 different RNA guide molecules targeting eight (8) SNPs restricted to upstream of, downstream of, or within a coding region were screened for high on-target activity in HeLa and HSC cells (Table 2).

[0215] In HeLa cells, six (6) different RNA guide molecules targeting three (3) SNPs relevant for an excision strategy were screened by transfecting SpCas9 and a guide-expressing DNA molecule. Briefly, screening was performed in a 96-well format with an SpCas9 coding plasmid (64 ng) co-transfected with a DNA plasmid that expresses a RNA guide molecule (20 ng) using JetOPTIMUS® reagent (Polyplus). Cells were harvested 72 hours post DNA transfection. Cell lysis and genomic DNA extraction was performed in Quick extract (Lucigen) and endogenous genomic regions were amplified using specific primers to measure on-target activity by next-generation sequencing (NGS) (FIG. 1, Table 2).

[0216] Next, novel OMNI CRISPR nucleases with unique PAM requirements were tested for editing of SNPs. These nucleases were tested in HeLa cells as described above. To this end, per each OMNI CRISPR nuclease, the corresponding OMNI-P2A-mCherry expression vector (pmOMNI, Table 4) was transfected into HeLa cells together with a sgRNA designed to target a specific location in the human genome (guide sequence portion sequence, Table 3). At 72 hours cells were harvested, and half of the cells were used for quantification of transfection efficiency by FACS using mCherry fluorescence as marker. The rest of the cells were lysed, and their genomic DNA content was used in a PCR reaction which amplified the corresponding putative genomic targets. Amplicons were subjected to NGS and the resulting sequences were then used to calculate the percentage of editing events in each target site. Short insertions or deletions (indels) around the cut site are the typical outcome of repair of DNA ends following nuclease induced DNA cleavage. The calculation of % editing was therefore deduced from the fraction of indels containing sequences within each amplicon.

[0217] In addition, twelve (12) additional, different RNA guide molecules targeting five (5) SNPs relevant to both excision and a one-guide strategy were screened in HSC cells. Briefly, 250×10³ HSC cells were mixed with preassembled RNPs composed of 105 pmole SpCas9 protein and 120 pmole of an sgRNA comprising a 20-nucleotide guide sequence portion, specified in Table 2, mixed with 100 pmole of electroporation enhancer (IDT-1075916) and electroporated using P3 primary cell 4D-nucleofector X Kit S (V4XP-3032, Lonza) by applying the DZ-100 program. A fraction of the cells were harvested 72 hours post electroporation and genomic DNA was extracted to measure on-target activity by NGS. According to NGS analysis, all RNA guide molecules (FIG. 2, Table 2) depicted indel activity ranging from 10%-90%. In addition, the editing of g30, g31, g32, g37, g38 and g41 were allele specific (FIG. 3).

[0218] To test a one-guide molecule editing strategy of the mutant allele by targeting a SNP residing in the coding region of the gene (e.g. rs10488532, rs1133906, rs1029357), which will lead to indels or frameshifts in the coding sequence and thus to a truncated protein, U2OS cells, homozygous to the rs10488532 SNP, were edited using an RNA molecule comprising a g39 or g40 guide sequence portion. Briefly, 200×10³ U2OS cells were mixed with preassembled RNPs composed of 105 pmole SpCas9 protein and 120 pmole of either sgRNA comprising a 20-nucleotide guide sequence portion, specified in Table 2, mixed with 100 pmole of electroporation enhancer (IDT-1075916) and electroporated using SE primary cell 4D-nucleofector X Kit S (V4XC-1032, Lonza) by applying the DN-100 program. A fraction of the cells were harvested 72 hours post electroporation, genomic DNA was extracted, and an on-target activity of 81%-95% was measured by NGS. Cells were grown for an additional three (3) days and then harvested for protein degradation. SAMD9L protein levels were detected with anti-SAMD9L antibody (25173-1-AP, Proteintech) and anti-GAPDH (60004-1-1 g, Proteintech) was used for normalization (FIGS. 4A-4B). For both guide sequence portions, high editing efficiency caused significant decrease in SAMD9L levels (FIGS. 4A-4B) and was highly correlated with editing levels. Thus, both guide sequence portions could be used for a one-guide molecule strategy.

TABLE 2
20-nucleotide or 22-nucleotide long guide sequence portion
sequences targeting SNPs located in SAMD9L region

| | | Guide | | |
|---|---|---|---|---|
| | | Sequence | | |
| | | Portion | | |
| Genomic | | (gRNA) | Guide Sequence | |
| region | SNP | Name | Portion Sequence | PAM region |
| Coding | rs1133906 | g30 | AUUUUUCUGGUGUUCUGUUU | |
| region | | | (SEQ ID NO: 8699) | |
| Exon 5 | | g31 | UGGUGUGUUUUGGAUUUUUC | |
| | | | (SEQ ID NO: 8724) | |
| | | OMNI-120 | AAACAGAACACCAGAAAAAUCC | AAAACACA |
| | | g91 | (SEQ ID NO: 8794) | |
| | | OMNI-176 | ACCGUCCAAAACAGAACACCAG | AAAAAUCC |
| | | OMNI-212 | (SEQ ID NO: 8802) | |
| | | OMNI-229 | | |
| | | g84 | | |
| Coding | rs1029357 | g32 | UCCAAGGAACAAAGAGCUUU | |
| region | | | (SEQ ID NO: 8215) | |
| Exon 5 | | g33 | ACCAAAAGCUCUUUGUUCCU | |
| | | | (SEQ ID NO: 8186) | |
| | | OMNI-103 | AGGAACAAAGAGCUUUUGGUGC | CAAACUGA |
| | | OMNI-120 | (SEQ ID NO: 8297) | |
| | | g133 | | |
| | | OMNI-212 | AAGGAACAAAGAGCUUUUGGUG | CCAAACUG |
| | | g70 | (SEQ ID NO: 8289) | |
| Downstream | rs6965114 | g36 | GACACUUUAUGACAGGCCCA | |
| Intergenic | | | (SEQ ID NO: 6005) | |
| region | | g37 | UGACACUUUAUGACAGGCCC | |
| | | | (SEQ ID NO: 6025) | |
| | | g38 | UGUCAUUCUUUAUUUACCAC | |
| | | | (SEQ ID NO: 6030) | |
| Coding | rs10488532 | g39 | UUUUGAUCAUUACAUUGAAG | |
| region | | | (SEQ ID NO: 8513) | |
| Exon 5 | | g40 | UACAUUGAAGUGGUCAAUGA | |
| | | | (SEQ ID NO: 8495) | |
| | | OMNI-156 | UUGACCACUUCAAUGUAAUGAU | CAAAAAGU |
| | | g97 | (SEQ ID NO: 8599) | |
| Downstream | rs66986908 | 841 | AAACCUGCCUACUGAUAUAC | |
| Intergenic | | | (SEQ ID NO: 6289) | |
| region | | g42 | AAGCCCGUAUAUCAGUAGGC | |
| | | | (SEQ ID NO: 6291) | |
| | | g43 | UCUGAAGCCCGUAUAUCAGU | |
| | | | (SEQ ID NO: 6334) | |
| | | OMNI-91 | CUGCCUACUGAUAUACGGGCUU | CAGAGUAA |
| | | OMNI-114 | (SEQ ID NO: 6426) | |
| | | g58 | | |
| | | OMNI-110 | UUACUCUGAAGCCCGUAUAUCA | GUAGGC |
| | | g113 | (SEQ ID NO: 6448) | |
| | | OMNI-129 | AAGCCCGUAUAUCAGUAGGCAG | GUUUGAA |
| | | g115 | (SEQ ID NO: 6397) | |
| | | OMNI-238 | CCUACUGAUAUAUGGGCUUCAG | AGUAAUGU |
| | | g140 | (SEQ ID NO: 6552) | |
| Upstream | rs2157743 | g59_alt | CGUAGACAGAAGUCACUUGU | |
| Intron 4 | | | (SEQ ID NO: 9128) | |
| | | g60_alt | GCGUAGACAGAAGUCACUUG | |
| | | | (SEQ ID NO: 9134) | |
| | | OMNI-93 | GUAGUGUAGACAGAAGUCACUU | GUGGGUCU |
| | | g68 | (SEQ ID NO: 9090) | |
| | | OMNI-103 | UGACUUCUGUCUACACUACAGA | UGAACUGA |
| | | g79 | (SEQ ID NO: 9105) | |
| Downstream | rs4267 | g61_alt | UCAAGCAGCAUUCUAGAGCC | |
| Intergenic | | | (SEQ ID NO: 7468) | |
| region | | OMNI-103 | GCAUUCUAGAGCUUGGAAUUUA | AGAACUAC |
| | | OMNI-120 | (SEQ ID NO: 7414) | |
| | | OMNI-231 | | |
| | | g80_alt | | |
| | | OMNI-215 | GUUCUUAAAUUCCAGGCUCUAG | AAUGCUGC |
| | | g136 | (SEQ ID NO: 7548) | |
| | | OMNI-215 | CUUAAAUUCCAGGCUCUAGAAU | GCUGCUUG |
| | | g137 | (SEQ ID NO: 7540) | |
| Downstream | rs2374629 | g62_alt | GUCCUGAUAACAUGUUCUCA | |
| Intergenic | | | (SEQ ID NO: 7174) | |
| region | | g63_alt | CACCUUGAGAACAUGUUAUC | |
| | | | (SEQ ID NO: 7160) | |
| | | g64_alt | UGUUCUCAAGGUGCACAGCU | |
| | | | (SEQ ID NO: 7185) | |

TABLE 3
Novel nucleases sgRNA scaffold sequences, with each OMNI
CRISPR nuclease also indicated with its PAM requirement

| OMNI | | |
|---|---|---|
| CRISPR | PAM | |
| Nuclease | Sequence | sgRNA Scaffold Sequence |
| OMNI-91 | NNGNGTNA | GUUGUAGUCCCCUCGUAGUgaaaACUAUCAGGUCACUA |
| (SEQ ID NO: | | CAAUAAAGUAGAACACUGAAAAGCUCUGACGGCCCA |
| 20274) | | CUUUCCGUGGGUCGUCAUCUUUUUU (SEQ ID NO: |
| | | 20252) |
| OMNI-93 | NNGGG | GUCUUAGUACUCUGUUGgaaaCAACAAUAGUUCUAAG |
| (SEQ ID NO: | | AUAAGGCUAUUUAUGCCGUAGGGUAUGGUGGUAUCC |
| 20275) | | CUUUAAUCCACCUUUAAGCCAUUGCUUAUGCAAUGG |
| | | CUUAUCUAUAUUUUUU (SEQ ID NO: 20253) |
| OMNI-103 | NNRACT | GUUUGAGAGUAGUGUAAgaaaUUACACUACAAGUUCA |
| (SEQ ID NO: | | AAUAAAAAUUUAUUCAAAUCCAUUUGCUACAUUGUG |
| 20276) | | UAGAAUUUAAAGAUCUGGCAACAGAUCUUUUUUU |
| | | (SEQ ID NO: 20254) |
| OMNI-110 | NNNNNC | GUUGUGAUUCGCUUCCgaaaGCAAGCGAAUCACAAUAA |
| (SEQ ID NO: | | GGAUUAUUCCGUUGUGAAAACAUUUAAGUCGGGCCU |
| 20277) | | CCUUCGGUUGGCUCGGCUUUUUUU (SEQ ID NO: 20255) |
| OMNI-114 | NRRRR | GUUGUACUUGCCUGUCgaaaGAUAGGCAAUAUAACAA |
| (SEQ ID NO: | | AUAUAAUUUCUUCUGAAAUUAUAUGUAAAAUGUUUA |
| 20278) | | AAGCCCUCCUUAUCAGGGGGGCUUUUUU (SEQ ID NO: |
| | | 20256) |
| OMNI-120 | NRRAC | GUUUGAGAGCCUUGUUAgaaaUAACAAGGCGAGUGCA |
| (SEQ ID NO: | | AAUAAGGUUUAACCGAAUUCACCGUUUAUGGACCGC |
| 20279) | | AUUGUGCGGAUUUUUU (SEQ ID NO: 20257) |
| OMNI-129 | NNNNGAA | GUUGUAGUUCCCUAAUGUUgaaaGACAUUAGGUUACU |
| (SEQ ID NO: | | GCGAUCAGGCAGUAUGCCUCAGAGCUCCGCCCUAACC |
| 20280) | | ACGUCUUGUGGUUGGGGCGUCUUUGCAUUUUUU (SEQ |
| | | ID NO: 20258) |
| OMNI-156 | NRRR | GUUGCGGCUAGACAUCgaaaGAUGUCUAGUCGUUAAU |
| (SEQ ID NO: | | AAGAACCUUUCAUACGAAAGGAUAUUUCACCAUAAA |
| 20281) | | AAAACAGGCACUUUGGUGCCUGUUUUUU (SEQ ID NO: |
| | | 20259) |
| OMNI-176 | NNAA | GUUGUGAAUUGCUUUCgaaaGAAGCAAUUCACAAUAA |
| (SEQ ID NO: | | GGAUUAUUCCGUUGUGAAAACAUUAAAAGCGGCACU |
| 20282) | | CUUUCGGGUGUCGCUUUCGUUUUUU (SEQ ID NO: |
| | | 20260) |
| OMNI-212 | NNAA | GUUGUGAUUUGCUUAGgaaaCUAGCAAAUCACAAUAA |
| (SEQ ID NO: | | GGAUUAUUCCGUUGUGAACACAUCAGGUUCUUCCCC |
| 20283) | | AUCGUCCUUUAACGGUGGGGAUUUUUU (SEQ ID NO: |
| | | 20261) |
| OMNI-215 | NVYGCT | GUUGUGAUUUGCUUUAgaaaUAAGCAAAUCACAAUAA |
| (SEQ ID NO: | | GGAUUCUAUCCGUUGUGAAAACAUUUCGGGAGGGGC |
| 20284) | | AACUCUCCCGCUUUUUU (SEQ ID NO: 20262) |
| OMNI-229 | NRRA | GUUUGAGAGCUUUGUUAgaaaUAACAAAGCGAGUGCA |
| (SEQ ID NO: | | AAUAAGAUUAUUCGAAAUCGCCUAUACGGACCGCAU |
| 20285) | | UGUGCGGAUUUUUU (SEQ ID NO: 20263) |
| OMNI-231 | NVNRC | GUUUGAGAGUAAUGUAGgaaaUUACAUUACAAGUUCA |
| (SEQ ID NO: | | AAUAACGAUUUAAUCGAAACCACCUUUCUAGGUACU |
| 20286) | | GCGGUUGCAGUUUUUU (SEQ ID NO: 20264) |
| OMNI-238 | NNYAM | GUUUGAGAGUAGUGUAAgaaaUUACACUACGAGUUCA |
| (SEQ ID NO: | | AAUAAAGAUCAUUCCAAAUCGUUCGGCUUUGCCGUU |
| 20287) | | CGCACAAGUGUUGUGCUUUUUU (SEQ ID NO: 20265) |

TABLE 4
OMNI CRISPR nuclease mammalian expression
plasmid and elements

| Plasmid | | |
|---|---|---|
| Name | Purpose | Elements |
| pmOMNI | Expressing OMNI | CMV promoter-Kozak-SV40 |
| | polypeptide in the | NLS-OMNI ORF (human |
| | mammalian system | optimized)-HA-SV40 |
| | | NLS-P2A-mCherry-bGH |
| | | poly(A) signal |

TABLE 4
Annex

| | SEQ ID NO of Amino | SEQ ID NO |
|---|---|---|
| Element | Acid Sequence | of DNA sequence |
| HA Tag | SEQ ID NO: 20266 | SEQ ID NO: 20270 |
| NLS | SEQ ID NO: 20267 | SEQ ID NO: 20271 |
| P2A | SEQ ID NO: 20268 | SEQ ID NO: 20272 |
| mCherry | SEQ ID NO: 20269 | SEQ ID NO: 20273 |

### REFERENCES

[0219] 1. Ahmad and Allen (1992) “Antibody-mediated Specific Binging and Cytotoxicity of Lipsome-entrapped Doxorubicin to Lung Cancer Cells in Vitro”, Cancer Research 52:4817-20.
[0220] 2. Anderson (1992) “Human gene therapy”, Science 256:808-13.
[0221] 3. Basha et al. (2011) “Influence of Cationic Lipid Composition on Gene Silencing Properties of Lipid Nanoparticle Formulations of siRNA in Antigen-Presenting Cells”, Mol. Ther. 19(12):2186-200.
[0222] 4. Behr (1994) Gene transfer with synthetic cationic amphiphiles: Prospects for gene therapy”, Bioconjuage Chem 5:382-89.
[0223] 5. Blaese (1995) “Vectors in cancer therapy: how will they deliver”, Cancer Gene Ther. 2:291-97.
[0224] 6. Blaese et al. (1995) “T lympocyte-directed gene therapy for ADA-SCID: initial trial results after 4 years”, Science 270(5235):475-80.
[0225] 7. Buchschacher and Panganiban (1992) “Human immunodeficiency virus vectors for inducible expression of foreign genes”, J. Virol. 66:2731-39.
[0226] 8. Burstein et al. (2017) “New CRISPR-Cas systems from uncultivated microbes”, Nature 542:237-41.
[0227] 9. Chang and Wilson (1987) “Modification of DNA ends can decrease end-joining relative to homologous recombination in mammalian cells”, Proc. Natl. Acad. Sci. USA 84:4959-4963.
[0228] 10. Chung et al. (2006) “Agrobacterium is not alone: gene transfer to plants by viruses and other bacteria”, Trends Plant Sci. 11(1):1-4.
[0229] 11. Coelho et al. (2013) “Safety and efficacy of RNAi therapy for transthyretin amyloidosis” N. Engl. J. Med. 369, 819-829.
[0230] 12. Collias and Beisel (2021) “CRISPR technologies and the search for the PAM-free nuclease”, Nature Communications 12, 555.
[0231] 13. Crystal (1995) “Transfer of genes to humans: early lessons and obstacles to success”,

[0232] Science 270(5235):404-10.
[0233] 14. Davidsson et al. (2018) “SAMD9 and SAMD9L in inherited predispositon to ataxia, pancytopenia, and myeloid malignancies”, Leukemia 32:1106-1115.
[0234] 15. Dillon (1993) “Regulation gene expression in gene therapy” Trends in Biotechnology 11(5):167-173.
[0235] 16. Dranoff et al. (1997) “A phase I study of vaccination with autologous, irradiated melanoma cells engineered to secrete human granulocyte macrophage colony stimulating factor”, Hum. Gene Ther. 8(1):111-23.
[0236] 17. Dunbar et al. (1995) “Retrovirally marked CD34-enriched peripheral blood and bone marrow cells contribute to long-term engraftment after autologous transplantation”, Blood 85:3048-57.
[0237] 18. Ellem et al. (1997) “A case report: immune responses and clinical course of the first human use of ganulocyte/macrophage-colony-stimulating-factor-tranduced autologous melanoma cells for immunotherapy”, Cancer Immunol Immunother 44:10-20.
[0238] 19. Gao and Huang (1995) “Cationic liposome-mediated gene transfer” Gene Ther. 2(10):710-22.
[0239] 20. Haddada et al. (1995) “Gene Therapy Using Adenovirus Vectors”, in: The Molecular Repertoire of Adenoviruses III: Biology and Pathogenesis, ed. Doerfler and Böhm, pp. 297-306.
[0240] 21. Han et al. (1995) “Ligand-directed retro-viral targeting of human breast cancer cells”, Proc Natl Acad Sci U.S.A. 92(21):9747-51.
[0241] 22. Hu et al. (2018) “Evolved Cas9 variants with broad PAM compatibility and high DNA specificity”, Nature 556(7699):57-63.
[0242] 23. Inaba et al. (1992) “Generation of large numbers of dendritic cells from mouse bone marrow cultures supplemented with granulocyte/macrophage colony-stimulating factor”, J Exp Med. 176(6):1693-702.
[0243] 24. Jinek et al. (2012) “A programmable dual-RNA-guided DNA endonuclease in adaptive bacterial immunity,” Science 337(6096):816-21.
[0244] 25. Johan et al. (1992) “GLVR1, a receptor for gibbon ape leukemia virus, is homologous to a phosphate permease of Neurospora crassa and is expressed at high levels in the brain and thymus”, J Virol 66(3):1635-40.
[0245] 26. Judge et al. (2006) “Design of noninflammatory synthetic siRNA mediating potent gene silencing in vivo”, Mol Ther. 13(3):494-505.
[0246] 27. Kohn et al. (1995) “Engraftment of gene-modified umbilical cord blood cells in neonates with adnosine deaminase deficiency”, Nature Medicine 1:1017-23.
[0247] 28. Kremer and Perricaudet (1995) “Adenovirus and adeno-associated virus mediated gene transfer”, Br. Med. Bull. 51(1):31-44.
[0248] 29. Macdiarmid et al. (2009) “Sequential treatment of drug-resistant tumors with targeted minicells containing siRNA or a cytotoxic drug”, Nat Biotehcnol. 27(7):643-51.
[0249] 30. Malech et al. (1997) “Prolonged production of NADPH oxidase-corrected granulocyes after gene therapy of chronic granulomatous disease”, PNAS 94(22):12133-38.
[0250] 31. Miller et al. (1991) “Construction and properties of retrovirus packaging cells based on gibbon ape leukemia virus”, J Virol. 65(5):2220-24.
[0251] 32. Miller (1992) “Human gene therapy comes of age”, Nature 357:455-60.
[0252] 33. Mitani and Caskey (1993) “Delivering therapeutic genes—matching approach and application”, Trends in Biotechnology 11(5):162-66.
[0253] 34. Nabel and Felgner (1993) “Direct gene transfer for immunotherapy and immunization”, Trends in Biotechnology 11(5):211-15.
[0254] 35. Nishimasu et al. (2018) “Engineered CRISPR-Cas9 nuclease with expanded targeting space”, Science 361(6408):1259-1262.
[0255] 36. Phowthongkum et al. (2017) “SAMD9L-Related ataxia-pancytopenia syndrome”, Gene Reviews, Eds. Adam et al. ISSN: 2372-0697.
[0256] 37. Remy et al. (1994) “Gene Transfer with a Series of Lipphilic DNA-Binding Molecules”, Bioconjugate Chem. 5(6):647-54.
[0257] 38. Sentmanat et al. (2018) “A Survey of Validation Strategies for CRISPR-Cas9 Editing”, Scientific Reports 8:888, doi:10.1038/s41598-018-19441-8.
[0258] 39. Sommerfelt et al. (1990) “Localization of the receptor gene for type D simian retroviruses on human chromosome 19”, J. Virol. 64(12):6214-20.
[0259] 40. Van Brunt (1988) “Molecular framing: transgenic animals as bioactors” Biotechnology 6:1149-54.
[0260] 41. Vigne et al. (1995) “Third-generation adenovectors for gene therapy”, Restorative Neurology and Neuroscience 8(1,2): 35-36.
[0261] 42. Walton et al. (2020) “Unconstrained genome targeting with near-PAMless engineered CRISPR-Cas9 variants”, Science 368(6488):290-296.
[0262] 43. Weissman and Kariko (2015) “mRNA:Fulfilling the promise of gene therapy”, Molecular Therapy (9):1416-7.
[0263] 44. Wilson et al. (1989) “Formation of infectious hybrid virion with gibbon ape leukemia virus and human T-cell leukemia virus retroviral envelope glycoproteins and the gag and pol proteins of Moloney murine leukemia virus”, J. Virol. 63:2374-78.
[0264] 45. Yu et al. (1994) “Progress towards gene therapy for HIV infection”, Gene Ther. 1(1):13-26.
[0265] 46. Zetsche et al. (2015) “Cpf1 is a single RNA-guided endonuclease of a class 2 CRIPSR-Cas system” Cell 163(3):759-71.
[0266] 47. Zuris et al. (2015) “Cationic lipid-mediated delivery of proteins enables efficient protein based genome editing in vitro and in vivo” Nat Biotechnol. 33(1):73-80.

The application's sequence listing, which the Patent Office published only in electronic form, follows.

SEQUENCE LISTING (20287 sequences)

SEQ ID NO: 1 - RNA, 20 nt, Artificial Sequence
  SAMD9L targeting guide sequence portion
aaaaauaccaguaauaccug

SEQ ID NO: 2 - RNA, 20 nt, Artificial Sequence
  SAMD9L targeting guide sequence portion
aaaauaccaguaauaccugu

SEQ ID NO: 3 - RNA, 20 nt, Artificial Sequence
  SAMD9L targeting guide sequence portion
aaacagguauuacugguauu

SEQ ID NO: 4 - RNA, 20 nt, Artificial Sequence
  SAMD9L targeting guide sequence portion
aaauaccaguaauaccuguu

SEQ ID NO: 5 - RNA, 20 nt, Artificial Sequence
  SAMD9L targeting guide sequence portion
aacagguauuacugguauuu

SEQ ID NO: 6 - RNA, 20 nt, Artificial Sequence
  SAMD9L targeting guide sequence portion
aauaaaaauaccaguaauac

SEQ ID NO: 7 - RNA, 20 nt, Artificial Sequence
  SAMD9L targeting guide sequence portion
aauaaacagguauuacuggu

SEQ ID NO: 8 - RNA, 20 nt, Artificial Sequence
  SAMD9L targeting guide sequence portion
aauaccaguaauaccuguuu

SEQ ID NO: 9 - RNA, 20 nt, Artificial Sequence
  SAMD9L targeting guide sequence portion
aauaccuguuuauucagguc

SEQ ID NO: 10 - RNA, 20 nt, Artificial Sequence
  SAMD9L targeting guide sequence portion
acagguauuacugguauuuu

SEQ ID NO: 11 - RNA, 20 nt, Artificial Sequence
  SAMD9L targeting guide sequence portion
accaguaauaccuguuuauu

SEQ ID NO: 12 - RNA, 20 nt, Artificial Sequence
  SAMD9L targeting guide sequence portion
accugaauaaacagguauua

SEQ ID NO: 13 - RNA, 20 nt, Artificial Sequence
  SAMD9L targeting guide sequence portion
accuguuuauucagguccac

SEQ ID NO: 14 - RNA, 20 nt, Artificial Sequence
  SAMD9L targeting guide sequence portion
agguauuacugguauuuuua

SEQ ID NO: 15 - RNA, 20 nt, Artificial Sequence
  SAMD9L targeting guide sequence portion
aguaauaccuguuuauucag

SEQ ID NO: 16 - RNA, 20 nt, Artificial Sequence
  SAMD9L targeting guide sequence portion
aguggaccugaauaaacagg

SEQ ID NO: 17 - RNA, 20 nt, Artificial Sequence
  SAMD9L targeting guide sequence portion
auaaaaauaccaguaauacc

SEQ ID NO: 18 - RNA, 20 nt, Artificial Sequence
  SAMD9L targeting guide sequence portion
auaaacagguauuacuggua

SEQ ID NO: 19 - RNA, 20 nt, Artificial Sequence
  SAMD9L targeting guide sequence portion
auaccaguaauaccuguuua

SEQ ID NO: 20 - RNA, 20 nt, Artificial Sequence
  SAMD9L targeting guide sequence portion
auaccuguuuauucaggucc

SEQ ID NO: 21 - RNA, 20 nt, Artificial Sequence
  SAMD9L targeting guide sequence portion
cagguauuacugguauuuuu

SEQ ID NO: 22 - RNA, 20 nt, Artificial Sequence
  SAMD9L targeting guide sequence portion
caguaauaccuguuuauuca

SEQ ID NO: 23 - RNA, 20 nt, Artificial Sequence
  SAMD9L targeting guide sequence portion
ccaguaauaccuguuuauuc

SEQ ID NO: 24 - RNA, 20 nt, Artificial Sequence
  SAMD9L targeting guide sequence portion
ccugaauaaacagguauuac

SEQ ID NO: 25 - RNA, 20 nt, Artificial Sequence
  SAMD9L targeting guide sequence portion
ccuguuuauucagguccacu

SEQ ID NO: 26 - RNA, 20 nt, Artificial Sequence
  SAMD9L targeting guide sequence portion
cugaauaaacagguauuacu

SEQ ID NO: 27 - RNA, 20 nt, Artificial Sequence
  SAMD9L targeting guide sequence portion
cugaguggaccugaauaaac

SEQ ID NO: 28 - RNA, 20 nt, Artificial Sequence
  SAMD9L targeting guide sequence portion
cuucugaguggaccugaaua

SEQ ID NO: 29 - RNA, 20 nt, Artificial Sequence
  SAMD9L targeting guide sequence portion
gaaaaaauaaaaauaccagu

SEQ ID NO: 30 - RNA, 20 nt, Artificial Sequence
  SAMD9L targeting guide sequence portion
gaauaaacagguauuacugg

SEQ ID NO: 31 - RNA, 20 nt, Artificial Sequence
  SAMD9L targeting guide sequence portion
gaccugaauaaacagguauu

SEQ ID NO: 32 - RNA, 20 nt, Artificial Sequence
  SAMD9L targeting guide sequence portion
gaguggaccugaauaaacag

SEQ ID NO: 33 - RNA, 20 nt, Artificial Sequence
  SAMD9L targeting guide sequence portion
ggaaaaaauaaaaauaccag

SEQ ID NO: 34 - RNA, 20 nt, Artificial Sequence
  SAMD9L targeting guide sequence portion
ggaccugaauaaacagguau

SEQ ID NO: 35 - RNA, 20 nt, Artificial Sequence
  SAMD9L targeting guide sequence portion
gguauuacugguauuuuuau

SEQ ID NO: 36 - RNA, 20 nt, Artificial Sequence
  SAMD9L targeting guide sequence portion
guaauaccuguuuauucagg

SEQ ID NO: 37 - RNA, 20 nt, Artificial Sequence
  SAMD9L targeting guide sequence portion
guauuacugguauuuuuauu

SEQ ID NO: 38 - RNA, 20 nt, Artificial Sequence
  SAMD9L targeting guide sequence portion
guggaccugaauaaacaggu

SEQ ID NO: 39 - RNA, 20 nt, Artificial Sequence
  SAMD9L targeting guide sequence portion
uaaaaauaccaguaauaccu

SEQ ID NO: 40 - RNA, 20 nt, Artificial Sequence
  SAMD9L targeting guide sequence portion
uaaacagguauuacugguau

SEQ ID NO: 41 - RNA, 20 nt, Artificial Sequence
  SAMD9L targeting guide sequence portion
uaauaccuguuuauucaggu

SEQ ID NO: 42 - RNA, 20 nt, Artificial Sequence
  SAMD9L targeting guide sequence portion
uaccaguaauaccuguuuau

SEQ ID NO: 43 - RNA, 20 nt, Artificial Sequence
  SAMD9L targeting guide sequence portion
uaccuguuuauucaggucca

SEQ ID NO: 44 - RNA, 20 nt, Artificial Sequence
  SAMD9L targeting guide sequence portion
ucugaguggaccugaauaaa

SEQ ID NO: 45 - RNA, 20 nt, Artificial Sequence
  SAMD9L targeting guide sequence portion
ugaauaaacagguauuacug

SEQ ID NO: 46 - RNA, 20 nt, Artificial Sequence
  SAMD9L targeting guide sequence portion
ugaguggaccugaauaaaca

SEQ ID NO: 47 - RNA, 20 nt, Artificial Sequence
  SAMD9L targeting guide sequence portion
uggaccugaauaaacaggua

SEQ ID NO: 48 - RNA, 20 nt, Artificial Sequence
  SAMD9L targeting guide sequence portion
uucugaguggaccugaauaa

SEQ ID NO: 49 - RNA, 21 nt, Artificial Sequence
  SAMD9L targeting guide sequence portion
aaaaauaccaguaauaccugu

SEQ ID NO: 50 - RNA, 21 nt, Artificial Sequence
  SAMD9L targeting guide sequence portion
aaaauaccaguaauaccuguu

SEQ ID NO: 51 - RNA, 21 nt, Artificial Sequence
  SAMD9L targeting guide sequence portion
aaacagguauuacugguauuu

SEQ ID NO: 52 - RNA, 21 nt, Artificial Sequence
  SAMD9L targeting guide sequence portion
aaauaccaguaauaccuguuu

SEQ ID NO: 53 - RNA, 21 nt, Artificial Sequence
  SAMD9L targeting guide sequence portion
aacagguauuacugguauuuu

SEQ ID NO: 54 - RNA, 21 nt, Artificial Sequence
  SAMD9L targeting guide sequence portion
aauaaaaauaccaguaauacc

SEQ ID NO: 55 - RNA, 21 nt, Artificial Sequence
  SAMD9L targeting guide sequence portion
aauaaacagguauuacuggua

SEQ ID NO: 56 - RNA, 21 nt, Artificial Sequence
  SAMD9L targeting guide sequence portion
aauaccaguaauaccuguuua

SEQ ID NO: 57 - RNA, 21 nt, Artificial Sequence
  SAMD9L targeting guide sequence portion
aauaccuguuuauucaggucc

SEQ ID NO: 58 - RNA, 21 nt, Artificial Sequence
  SAMD9L targeting guide sequence portion
acagguauuacugguauuuuu

SEQ ID NO: 59 - RNA, 21 nt, Artificial Sequence
  SAMD9L targeting guide sequence portion
accaguaauaccuguuuauuc

SEQ ID NO: 60 - RNA, 21 nt, Artificial Sequence
  SAMD9L targeting guide sequence portion
accugaauaaacagguauuac

SEQ ID NO: 61 - RNA, 21 nt, Artificial Sequence
  SAMD9L targeting guide sequence portion
accuguuuauucagguccacu

SEQ ID NO: 62 - RNA, 21 nt, Artificial Sequence
  SAMD9L targeting guide sequence portion
acuucugaguggaccugaaua

SEQ ID NO: 63 - RNA, 21 nt, Artificial Sequence
  SAMD9L targeting guide sequence portion
aggaaaaaauaaaaauaccag

SEQ ID NO: 64 - RNA, 21 nt, Artificial Sequence
  SAMD9L targeting guide sequence portion
agguauuacugguauuuuuau

SEQ ID NO: 65 - RNA, 21 nt, Artificial Sequence
  SAMD9L targeting guide sequence portion
aguaauaccuguuuauucagg

SEQ ID NO: 66 - RNA, 21 nt, Artificial Sequence
  SAMD9L targeting guide sequence portion
aguggaccugaauaaacaggu

SEQ ID NO: 67 - RNA, 21 nt, Artificial Sequence
  SAMD9L targeting guide sequence portion
auaaaaauaccaguaauaccu

SEQ ID NO: 68 - RNA, 21 nt, Artificial Sequence
  SAMD9L targeting guide sequence portion
auaaacagguauuacugguau

SEQ ID NO: 69 - RNA, 21 nt, Artificial Sequence
  SAMD9L targeting guide sequence portion
auaccaguaauaccuguuuau

SEQ ID NO: 70 - RNA, 21 nt, Artificial Sequence
  SAMD9L targeting guide sequence portion
auaccuguuuauucaggucca

SEQ ID NO: 71 - RNA, 21 nt, Artificial Sequence
  SAMD9L targeting guide sequence portion
cagguauuacugguauuuuua

SEQ ID NO: 72 - RNA, 21 nt, Artificial Sequence
  SAMD9L targeting guide sequence portion
caguaauaccuguuuauucag

SEQ ID NO: 73 - RNA, 21 nt, Artificial Sequence
  SAMD9L targeting guide sequence portion
ccaguaauaccuguuuauuca

SEQ ID NO: 74 - RNA, 21 nt, Artificial Sequence
  SAMD9L targeting guide sequence portion
ccugaauaaacagguauuacu

SEQ ID NO: 75 - RNA, 21 nt, Artificial Sequence
  SAMD9L targeting guide sequence portion
ccuguuuauucagguccacuc

SEQ ID NO: 76 - RNA, 21 nt, Artificial Sequence
  SAMD9L targeting guide sequence portion
cugaauaaacagguauuacug

SEQ ID NO: 77 - RNA, 21 nt, Artificial Sequence
  SAMD9L targeting guide sequence portion
cugaguggaccugaauaaaca

SEQ ID NO: 78 - RNA, 21 nt, Artificial Sequence
  SAMD9L targeting guide sequence portion
cuucugaguggaccugaauaa

SEQ ID NO: 79 - RNA, 21 nt, Artificial Sequence
  SAMD9L targeting guide sequence portion
gaauaaacagguauuacuggu

SEQ ID NO: 80 - RNA, 21 nt, Artificial Sequence
  SAMD9L targeting guide sequence portion
gaccugaauaaacagguauua

SEQ ID NO: 81 - RNA, 21 nt, Artificial Sequence
  SAMD9L targeting guide sequence portion
gaguggaccugaauaaacagg

SEQ ID NO: 82 - RNA, 21 nt, Artificial Sequence
  SAMD9L targeting guide sequence portion
ggaaaaaauaaaaauaccagu

SEQ ID NO: 83 - RNA, 21 nt, Artificial Sequence
  SAMD9L targeting guide sequence portion
ggaccugaauaaacagguauu

SEQ ID NO: 84 - RNA, 21 nt, Artificial Sequence
  SAMD9L targeting guide sequence portion
gguauuacugguauuuuuauu

SEQ ID NO: 85 - RNA, 21 nt, Artificial Sequence
  SAMD9L targeting guide sequence portion
guaauaccuguuuauucaggu

SEQ ID NO: 86 - RNA, 21 nt, Artificial Sequence
  SAMD9L targeting guide sequence portion
guggaccugaauaaacaggua

SEQ ID NO: 87 - RNA, 21 nt, Artificial Sequence
  SAMD9L targeting guide sequence portion
uaaaaauaccaguaauaccug

SEQ ID NO: 88 - RNA, 21 nt, Artificial Sequence
  SAMD9L targeting guide sequence portion
uaaacagguauuacugguauu

SEQ ID NO: 89 - RNA, 21 nt, Artificial Sequence
  SAMD9L targeting guide sequence portion
uaauaccuguuuauucagguc

SEQ ID NO: 90 - RNA, 21 nt, Artificial Sequence
  SAMD9L targeting guide sequence portion
uaccaguaauaccuguuuauu

SEQ ID NO: 91 - RNA, 21 nt, Artificial Sequence
  SAMD9L targeting guide sequence portion
uaccuguuuauucagguccac

SEQ ID NO: 92 - RNA, 21 nt, Artificial Sequence
  SAMD9L targeting guide sequence portion
ucugaguggaccugaauaaac

SEQ ID NO: 93 - RNA, 21 nt, Artificial Sequence
  SAMD9L targeting guide sequence portion
ugaauaaacagguauuacugg

SEQ ID NO: 94 - RNA, 21 nt, Artificial Sequence
  SAMD9L targeting guide sequence portion
ugaguggaccugaauaaacag

SEQ ID NO: 95 - RNA, 21 nt, Artificial Sequence
  SAMD9L targeting guide sequence portion
uggaccugaauaaacagguau

SEQ ID NO: 96 - RNA, 21 nt, Artificial Sequence
  SAMD9L targeting guide sequence portion
uucugaguggaccugaauaaa

SEQ ID NO: 97 - RNA, 22 nt, Artificial Sequence
  SAMD9L targeting guide sequence portion
aaaaauaccaguaauaccuguu

SEQ ID NO: 98 - RNA, 22 nt, Artificial Sequence
  SAMD9L targeting guide sequence portion
aaaauaccaguaauaccuguuu

SEQ ID NO: 99 - RNA, 22 nt, Artificial Sequence
  SAMD9L targeting guide sequence portion
aaacagguauuacugguauuuu

SEQ ID NO: 100 - RNA, 22 nt, Artificial Sequence
  SAMD9L targeting guide sequence portion
aaauaaaaauaccaguaauacc

SEQ ID NO: 101 - RNA, 22 nt, Artificial Sequence
  SAMD9L targeting guide sequence portion
aaauaccaguaauaccuguuua

SEQ ID NO: 102 - RNA, 22 nt, Artificial Sequence
  SAMD9L targeting guide sequence portion
aacagguauuacugguauuuuu

SEQ ID NO: 103 - RNA, 22 nt, Artificial Sequence
  SAMD9L targeting guide sequence portion
aauaaaaauaccaguaauaccu

SEQ ID NO: 104 - RNA, 22 nt, Artificial Sequence
  SAMD9L targeting guide sequence portion
aauaaacagguauuacugguau

SEQ ID NO: 105 - RNA, 22 nt, Artificial Sequence
  SAMD9L targeting guide sequence portion
aauaccaguaauaccuguuuau

SEQ ID NO: 106 - RNA, 22 nt, Artificial Sequence
  SAMD9L targeting guide sequence portion
aauaccuguuuauucaggucca

SEQ ID NO: 107 - RNA, 22 nt, Artificial Sequence
  SAMD9L targeting guide sequence portion
acagguauuacugguauuuuua

SEQ ID NO: 108 - RNA, 22 nt, Artificial Sequence
  SAMD9L targeting guide sequence portion
accaguaauaccuguuuauuca

SEQ ID NO: 109 - RNA, 22 nt, Artificial Sequence
  SAMD9L targeting guide sequence portion
accugaauaaacagguauuacu

SEQ ID NO: 110 - RNA, 22 nt, Artificial Sequence
  SAMD9L targeting guide sequence portion
accuguuuauucagguccacuc

SEQ ID NO: 111 - RNA, 22 nt, Artificial Sequence
  SAMD9L targeting guide sequence portion
acuucugaguggaccugaauaa

SEQ ID NO: 112 - RNA, 22 nt, Artificial Sequence
  SAMD9L targeting guide sequence portion
aggaaaaaauaaaaauaccagu

SEQ ID NO: 113 - RNA, 22 nt, Artificial Sequence
  SAMD9L targeting guide sequence portion
agguauuacugguauuuuuauu

SEQ ID NO: 114 - RNA, 22 nt, Artificial Sequence
  SAMD9L targeting guide sequence portion
aguaauaccuguuuauucaggu

SEQ ID NO: 115 - RNA, 22 nt, Artificial Sequence
  SAMD9L targeting guide sequence portion
aguggaccugaauaaacaggua

SEQ ID NO: 116 - RNA, 22 nt, Artificial Sequence
  SAMD9L targeting guide sequence portion
auaaaaauaccaguaauaccug

SEQ ID NO: 117 - RNA, 22 nt, Artificial Sequence
  SAMD9L targeting guide sequence portion
auaaacagguauuacugguauu

SEQ ID NO: 118 - RNA, 22 nt, Artificial Sequence
  SAMD9L targeting guide sequence portion
auaccaguaauaccuguuuauu

SEQ ID NO: 119 - RNA, 22 nt, Artificial Sequence
  SAMD9L targeting guide sequence portion
auaccuguuuauucagguccac

SEQ ID NO: 120 - RNA, 22 nt, Artificial Sequence
  SAMD9L targeting guide sequence portion
cacuucugaguggaccugaaua

SEQ ID NO: 121 - RNA, 22 nt, Artificial Sequence
  SAMD9L targeting guide sequence portion
cagguauuacugguauuuuuau

SEQ ID NO: 122 - RNA, 22 nt, Artificial Sequence
  SAMD9L targeting guide sequence portion
caguaauaccuguuuauucagg

SEQ ID NO: 123 - RNA, 22 nt, Artificial Sequence
  SAMD9L targeting guide sequence portion
ccaguaauaccuguuuauucag

SEQ ID NO: 124 - RNA, 22 nt, Artificial Sequence
  SAMD9L targeting guide sequence portion
ccugaauaaacagguauuacug

SEQ ID NO: 125 - RNA, 22 nt, Artificial Sequence
  SAMD9L targeting guide sequence portion
ccuguuuauucagguccacuca

SEQ ID NO: 126 - RNA, 22 nt, Artificial Sequence
  SAMD9L targeting guide sequence portion
cugaauaaacagguauuacugg

SEQ ID NO: 127 - RNA, 22 nt, Artificial Sequence
  SAMD9L targeting guide sequence portion
cugaguggaccugaauaaacag

SEQ ID NO: 128 - RNA, 22 nt, Artificial Sequence
  SAMD9L targeting guide sequence portion
cuucugaguggaccugaauaaa

SEQ ID NO: 129 - RNA, 22 nt, Artificial Sequence
  SAMD9L targeting guide sequence portion
gaauaaacagguauuacuggua

SEQ ID NO: 130 - RNA, 22 nt, Artificial Sequence
  SAMD9L targeting guide sequence portion
gaccugaauaaacagguauuac

SEQ ID NO: 131 - RNA, 22 nt, Artificial Sequence
  SAMD9L targeting guide sequence portion
gaggaaaaaauaaaaauaccag

SEQ ID NO: 132 - RNA, 22 nt, Artificial Sequence
  SAMD9L targeting guide sequence portion
gaguggaccugaauaaacaggu

SEQ ID NO: 133 - RNA, 22 nt, Artificial Sequence
  SAMD9L targeting guide sequence portion
ggaaaaaauaaaaauaccagua

SEQ ID NO: 134 - RNA, 22 nt, Artificial Sequence
  SAMD9L targeting guide sequence portion
ggaccugaauaaacagguauua

SEQ ID NO: 135 - RNA, 22 nt, Artificial Sequence
  SAMD9L targeting guide sequence portion
gguauuacugguauuuuuauuu

SEQ ID NO: 136 - RNA, 22 nt, Artificial Sequence
  SAMD9L targeting guide sequence portion
guaauaccuguuuauucagguc

SEQ ID NO: 137 - RNA, 22 nt, Artificial Sequence
  SAMD9L targeting guide sequence portion
guggaccugaauaaacagguau

SEQ ID NO: 138 - RNA, 22 nt, Artificial Sequence
  SAMD9L targeting guide sequence portion
uaaaaauaccaguaauaccugu

SEQ ID NO: 139 - RNA, 22 nt, Artificial Sequence
  SAMD9L targeting guide sequence portion
uaaacagguauuacugguauuu

SEQ ID NO: 140 - RNA, 22 nt, Artificial Sequence
  SAMD9L targeting guide sequence portion
uaauaccuguuuauucaggucc

SEQ ID NO: 141 - RNA, 22 nt, Artificial Sequence
  SAMD9L targeting guide sequence portion
uaccaguaauaccuguuuauuc

SEQ ID NO: 142 - RNA, 22 nt, Artificial Sequence
  SAMD9L targeting guide sequence portion
uaccuguuuauucagguccacu

SEQ ID NO: 143 - RNA, 22 nt, Artificial Sequence
  SAMD9L targeting guide sequence portion
ucugaguggaccugaauaaaca

SEQ ID NO: 144 - RNA, 22 nt, Artificial Sequence
  SAMD9L targeting guide sequence portion
ugaauaaacagguauuacuggu

SEQ ID NO: 145 - RNA, 22 nt, Artificial Sequence
  SAMD9L targeting guide sequence portion
ugaguggaccugaauaaacagg

SEQ ID NO: 146 - RNA, 22 nt, Artificial Sequence
  SAMD9L targeting guide sequence portion
uggaccugaauaaacagguauu

SEQ ID NO: 147 - RNA, 22 nt, Artificial Sequence
  SAMD9L targeting guide sequence portion
uucugaguggaccugaauaaac

SEQ ID NO: 148 - RNA, 20 nt, Artificial Sequence
  SAMD9L targeting guide sequence portion
aaaaaaugaagucaaagacg

SEQ ID NO: 149 - RNA, 20 nt, Artificial Sequence
  SAMD9L targeting guide sequence portion
aaaaaugaagucaaagacgu

SEQ ID NO: 150 - RNA, 20 nt, Artificial Sequence
  SAMD9L targeting guide sequence portion
aaaaugaagucaaagacguc

SEQ ID NO: 151 - RNA, 20 nt, Artificial Sequence
  SAMD9L targeting guide sequence portion
aaagacguccugcgucgucu

SEQ ID NO: 152 - RNA, 20 nt, Artificial Sequence
  SAMD9L targeting guide sequence portion
aaaugaagucaaagacgucc

SEQ ID NO: 153 - RNA, 20 nt, Artificial Sequence
  SAMD9L targeting guide sequence portion
aagacguccugcgucgucua

SEQ ID NO: 154 - RNA, 20 nt, Artificial Sequence
  SAMD9L targeting guide sequence portion
aagucaaagacguccugcgu

SEQ ID NO: 155 - RNA, 20 nt, Artificial Sequence
  SAMD9L targeting guide sequence portion
aaugaagucaaagacguccu

SEQ ID NO: 156 - RNA, 20 nt, Artificial Sequence
  SAMD9L targeting guide sequence portion
accaguuagacgacgcagga

SEQ ID NO: 157 - RNA, 20 nt, Artificial Sequence
  SAMD9L targeting guide sequence portion
acgacgcaggacgucuuuga

SEQ ID NO: 158 - RNA, 20 nt, Artificial Sequence
  SAMD9L targeting guide sequence portion
acgcaggacgucuuugacuu

SEQ ID NO: 159 - RNA, 20 nt, Artificial Sequence
  SAMD9L targeting guide sequence portion
acguccugcgucgucuaacu

SEQ ID NO: 160 - RNA, 20 nt, Artificial Sequence
  SAMD9L targeting guide sequence portion
acgucuuugacuucauuuuu

SEQ ID NO: 161 - RNA, 20 nt, Artificial Sequence
  SAMD9L targeting guide sequence portion
agacgacgcaggacgucuuu

SEQ ID NO: 162 - RNA, 20 nt, Artificial Sequence
  SAMD9L targeting guide sequence portion
agacguccugcgucgucuaa

SEQ ID NO: 163 - RNA, 20 nt, Artificial Sequence
  SAMD9L targeting guide sequence portion
aggacgucuuugacuucauu

SEQ ID NO: 164 - RNA, 20 nt, Artificial Sequence
  SAMD9L targeting guide sequence portion
agucaaagacguccugcguc

SEQ ID NO: 165 - RNA, 20 nt, Artificial Sequence
  SAMD9L targeting guide sequence portion
aguuagacgacgcaggacgu

SEQ ID NO: 166 - RNA, 20 nt, Artificial Sequence
  SAMD9L targeting guide sequence portion
augaagucaaagacguccug

SEQ ID NO: 167 - RNA, 20 nt, Artificial Sequence
  SAMD9L targeting guide sequence portion
caaagacguccugcgucguc

SEQ ID NO: 168 - RNA, 20 nt, Artificial Sequence
  SAMD9L targeting guide sequence portion
caggacgucuuugacuucau

SEQ ID NO: 169 - RNA, 20 nt, Artificial Sequence
  SAMD9L targeting guide sequence portion
caguuagacgacgcaggacg

SEQ ID NO: 170 - RNA, 20 nt, Artificial Sequence
  SAMD9L targeting guide sequence portion
ccaguuagacgacgcaggac

SEQ ID NO: 171 - RNA, 20 nt, Artificial Sequence
  SAMD9L targeting guide sequence portion
ccugaccaguuagacgacgc

SEQ ID NO: 172 - RNA, 20 nt, Artificial Sequence
  SAMD9L targeting guide sequence portion
cgacgcaggacgucuuugac

SEQ ID NO: 173 - RNA, 20 nt, Artificial Sequence
  SAMD9L targeting guide sequence portion
cgcaggacgucuuugacuuc

SEQ ID NO: 174 - RNA, 20 nt, Artificial Sequence
  SAMD9L targeting guide sequence portion
cguccugcgucgucuaacug

SEQ ID NO: 175 - RNA, 20 nt, Artificial Sequence
  SAMD9L targeting guide sequence portion
cgucuuugacuucauuuuuu

SEQ ID NO: 176 - RNA, 20 nt, Artificial Sequence
  SAMD9L targeting guide sequence portion
cugaccaguuagacgacgca

SEQ ID NO: 177 - RNA, 20 nt, Artificial Sequence
  SAMD9L targeting guide sequence portion
gaagucaaagacguccugcg

SEQ ID NO: 178 - RNA, 20 nt, Artificial Sequence
  SAMD9L targeting guide sequence portion
gaccaguuagacgacgcagg

SEQ ID NO: 179 - RNA, 20 nt, Artificial Sequence
  SAMD9L targeting guide sequence portion
gacgacgcaggacgucuuug

SEQ ID NO: 180 - RNA, 20 nt, Artificial Sequence
  SAMD9L targeting guide sequence portion
gacgcaggacgucuuugacu

SEQ ID NO: 181 - RNA, 20 nt, Artificial Sequence
  SAMD9L targeting guide sequence portion
gacguccugcgucgucuaac

SEQ ID NO: 182 - RNA, 20 nt, Artificial Sequence
  SAMD9L targeting guide sequence portion
gacgucuuugacuucauuuu

SEQ ID NO: 183 - RNA, 20 nt, Artificial Sequence
  SAMD9L targeting guide sequence portion
gcaggacgucuuugacuuca

SEQ ID NO: 184 - RNA, 20 nt, Artificial Sequence
  SAMD9L targeting guide sequence portion
gccugaccaguuagacgacg

SEQ ID NO: 185 - RNA, 20 nt, Artificial Sequence
  SAMD9L targeting guide sequence portion
ggacgucuuugacuucauuu

SEQ ID NO: 186 - RNA, 20 nt, Artificial Sequence
  SAMD9L targeting guide sequence portion
gucaaagacguccugcgucg

SEQ ID NO: 187 - RNA, 20 nt, Artificial Sequence
  SAMD9L targeting guide sequence portion
guccugcgucgucuaacugg

SEQ ID NO: 188 - RNA, 20 nt, Artificial Sequence
  SAMD9L targeting guide sequence portion
guuagacgacgcaggacguc

SEQ ID NO: 189 - RNA, 20 nt, Artificial Sequence
  SAMD9L targeting guide sequence portion
uagacgacgcaggacgucuu

SEQ ID NO: 190 - RNA, 20 nt, Artificial Sequence
  SAMD9L targeting guide sequence portion
ucaaagacguccugcgucgu

SEQ ID NO: 191 - RNA, 20 nt, Artificial Sequence
  SAMD9L targeting guide sequence portion
ugaagucaaagacguccugc

SEQ ID NO: 192 - RNA, 20 nt, Artificial Sequence
  SAMD9L targeting guide sequence portion
ugaccaguuagacgacgcag

SEQ ID NO: 193 - RNA, 20 nt, Artificial Sequence
  SAMD9L targeting guide sequence portion
uuagacgacgcaggacgucu

SEQ ID NO: 194 - RNA, 21 nt, Artificial Sequence
  SAMD9L targeting guide sequence portion
aaaaaaugaagucaaagacgu

SEQ ID NO: 195 - RNA, 21 nt, Artificial Sequence
  SAMD9L targeting guide sequence portion
aaaaaugaagucaaagacguc

SEQ ID NO: 196 - RNA, 21 nt, Artificial Sequence
  SAMD9L targeting guide sequence portion
aaaaugaagucaaagacgucc

SEQ ID NO: 197 - RNA, 21 nt, Artificial Sequence
  SAMD9L targeting guide sequence portion
aaagacguccugcgucgucua

SEQ ID NO: 198 - RNA, 21 nt, Artificial Sequence
  SAMD9L targeting guide sequence portion
aaaugaagucaaagacguccu

SEQ ID NO: 199 - RNA, 21 nt, Artificial Sequence
  SAMD9L targeting guide sequence portion
aagacguccugcgucgucuaa

SEQ ID NO: 200 - RNA, 21 nt, Artificial Sequence
  SAMD9L targeting guide sequence portion
aagucaaagacguccugcguc

SEQ ID NO: 201 - RNA, 21 nt, Artificial Sequence
  SAMD9L targeting guide sequence portion
aaugaagucaaagacguccug

SEQ ID NO: 202 - RNA, 21 nt, Artificial Sequence
  SAMD9L targeting guide sequence portion
accaguuagacgacgcaggac

SEQ ID NO: 203 - RNA, 21 nt, Artificial Sequence
  SAMD9L targeting guide sequence portion
acgacgcaggacgucuuugac

SEQ ID NO: 204 - RNA, 21 nt, Artificial Sequence
  SAMD9L targeting guide sequence portion
acgcaggacgucuuugacuuc

SEQ ID NO: 205 - RNA, 21 nt, Artificial Sequence
  SAMD9L targeting guide sequence portion
acguccugcgucgucuaacug

SEQ ID NO: 206 - RNA, 21 nt, Artificial Sequence
  SAMD9L targeting guide sequence portion
acgucuuugacuucauuuuuu

SEQ ID NO: 207 - RNA, 21 nt, Artificial Sequence
  SAMD9L targeting guide sequence portion
agacgacgcaggacgucuuug

SEQ ID NO: 208 - RNA, 21 nt, Artificial Sequence
  SAMD9L targeting guide sequence portion
agacguccugcgucgucuaac

SEQ ID NO: 209 - RNA, 21 nt, Artificial Sequence
  SAMD9L targeting guide sequence portion
agccugaccaguuagacgacg

SEQ ID NO: 210 - RNA, 21 nt, Artificial Sequence
  SAMD9L targeting guide sequence portion
aggacgucuuugacuucauuu

SEQ ID NO: 211 - RNA, 21 nt, Artificial Sequence
  SAMD9L targeting guide sequence portion
agucaaagacguccugcgucg

SEQ ID NO: 212 - RNA, 21 nt, Artificial Sequence
  SAMD9L targeting guide sequence portion
aguuagacgacgcaggacguc

SEQ ID NO: 213 - RNA, 21 nt, Artificial Sequence
  SAMD9L targeting guide sequence portion
augaagucaaagacguccugc

SEQ ID NO: 214 - RNA, 21 nt, Artificial Sequence
  SAMD9L targeting guide sequence portion
caaagacguccugcgucgucu

SEQ ID NO: 215 - RNA, 21 nt, Artificial Sequence
  SAMD9L targeting guide sequence portion
caggacgucuuugacuucauu

SEQ ID NO: 216 - RNA, 21 nt, Artificial Sequence
  SAMD9L targeting guide sequence portion
caguuagacgacgcaggacgu

SEQ ID NO: 217 - RNA, 21 nt, Artificial Sequence
  SAMD9L targeting guide sequence portion
ccaguuagacgacgcaggacg

SEQ ID NO: 218 - RNA, 21 nt, Artificial Sequence
  SAMD9L targeting guide sequence portion
ccugaccaguuagacgacgca

SEQ ID NO: 219 - RNA, 21 nt, Artificial Sequence
  SAMD9L targeting guide sequence portion
cgacgcaggacgucuuugacu

SEQ ID NO: 220 - RNA, 21 nt, Artificial Sequence
  SAMD9L targeting guide sequence portion
cgcaggacgucuuugacuuca

SEQ ID NO: 221 - RNA, 21 nt, Artificial Sequence
  SAMD9L targeting guide sequence portion
cguccugcgucgucuaacugg

SEQ ID NO: 222 - RNA, 21 nt, Artificial Sequence
  SAMD9L targeting guide sequence portion
cugaccaguuagacgacgcag

SEQ ID NO: 223 - RNA, 21 nt, Artificial Sequence
  SAMD9L targeting guide sequence portion
gaagucaaagacguccugcgu

SEQ ID NO: 224 - RNA, 21 nt, Artificial Sequence
  SAMD9L targeting guide sequence portion
gaccaguuagacgacgcagga

SEQ ID NO: 225 - RNA, 21 nt, Artificial Sequence
  SAMD9L targeting guide sequence portion
gacgacgcaggacgucuuuga

SEQ ID NO: 226 - RNA, 21 nt, Artificial Sequence
  SAMD9L targeting guide sequence portion
gacgcaggacgucuuugacuu

SEQ ID NO: 227 - RNA, 21 nt, Artificial Sequence
  SAMD9L targeting guide sequence portion
gacguccugcgucgucuaacu

SEQ ID NO: 228 - RNA, 21 nt, Artificial Sequence
  SAMD9L targeting guide sequence portion
gacgucuuugacuucauuuuu

SEQ ID NO: 229 - RNA, 21 nt, Artificial Sequence
  SAMD9L targeting guide sequence portion
gcaggacgucuuugacuucau

SEQ ID NO: 230 - RNA, 21 nt, Artificial Sequence
  SAMD9L targeting guide sequence portion
gccugaccaguuagacgacgc

SEQ ID NO: 231 - RNA, 21 nt, Artificial Sequence
  SAMD9L targeting guide sequence portion
ggacgucuuugacuucauuuu

SEQ ID NO: 232 - RNA, 21 nt, Artificial Sequence
  SAMD9L targeting guide sequence portion
gucaaagacguccugcgucgu

SEQ ID NO: 233 - RNA, 21 nt, Artificial Sequence
  SAMD9L targeting guide sequence portion
guccugcgucgucuaacuggu

SEQ ID NO: 234 - RNA, 21 nt, Artificial Sequence
  SAMD9L targeting guide sequence portion
guuagacgacgcaggacgucu

SEQ ID NO: 235 - RNA, 21 nt, Artificial Sequence
  SAMD9L targeting guide sequence portion
uagacgacgcaggacgucuuu

SEQ ID NO: 236 - RNA, 21 nt, Artificial Sequence
  SAMD9L targeting guide sequence portion
ucaaagacguccugcgucguc

SEQ ID NO: 237 - RNA, 21 nt, Artificial Sequence
  SAMD9L targeting guide sequence portion
ugaagucaaagacguccugcg

SEQ ID NO: 238 - RNA, 21 nt, Artificial Sequence
  SAMD9L targeting guide sequence portion
ugaccaguuagacgacgcagg

SEQ ID NO: 239 - RNA, 21 nt, Artificial Sequence
  SAMD9L targeting guide sequence portion
uuagacgacgcaggacgucuu

SEQ ID NO: 240 - RNA, 22 nt, Artificial Sequence
  SAMD9L targeting guide sequence portion
aaaaaaugaagucaaagacguc

SEQ ID NO: 241 - RNA, 22 nt, Artificial Sequence
  SAMD9L targeting guide sequence portion
aaaaaugaagucaaagacgucc

SEQ ID NO: 242 - RNA, 22 nt, Artificial Sequence
  SAMD9L targeting guide sequence portion
aaaaugaagucaaagacguccu

SEQ ID NO: 243 - RNA, 22 nt, Artificial Sequence
  SAMD9L targeting guide sequence portion
aaagacguccugcgucgucuaa

SEQ ID NO: 244 - RNA, 22 nt, Artificial Sequence
  SAMD9L targeting guide sequence portion
aaaugaagucaaagacguccug

SEQ ID NO: 245 - RNA, 22 nt, Artificial Sequence
  SAMD9L targeting guide sequence portion
aagacguccugcgucgucuaac

SEQ ID NO: 246 - RNA, 22 nt, Artificial Sequence
  SAMD9L targeting guide sequence portion
aagucaaagacguccugcgucg

SEQ ID NO: 247 - RNA, 22 nt, Artificial Sequence
  SAMD9L targeting guide sequence portion
aaugaagucaaagacguccugc

SEQ ID NO: 248 - RNA, 22 nt, Artificial Sequence
  SAMD9L targeting guide sequence portion
accaguuagacgacgcaggacg

SEQ ID NO: 249 - RNA, 22 nt, Artificial Sequence
  SAMD9L targeting guide sequence portion
acgacgcaggacgucuuugacu

SEQ ID NO: 250 - RNA, 22 nt, Artificial Sequence
  SAMD9L targeting guide sequence portion
acgcaggacgucuuugacuuca

SEQ ID NO: 251 - RNA, 22 nt, Artificial Sequence
  SAMD9L targeting guide sequence portion
acguccugcgucgucuaacugg

SEQ ID NO: 252 - RNA, 22 nt, Artificial Sequence
  SAMD9L targeting guide sequence portion
agacgacgcaggacgucuuuga

SEQ ID NO: 253 - RNA, 22 nt, Artificial Sequence
  SAMD9L targeting guide sequence portion
agacguccugcgucgucuaacu

SEQ ID NO: 254 - RNA, 22 nt, Artificial Sequence
  SAMD9L targeting guide sequence portion
agccugaccaguuagacgacgc

SEQ ID NO: 255 - RNA, 22 nt, Artificial Sequence
  SAMD9L targeting guide sequence portion
aggacgucuuugacuucauuuu

SEQ ID NO: 256 - RNA, 22 nt, Artificial Sequence
  SAMD9L targeting guide sequence portion
agucaaagacguccugcgucgu

SEQ ID NO: 257 - RNA, 22 nt, Artificial Sequence
  SAMD9L targeting guide sequence portion
aguuagacgacgcaggacgucu

SEQ ID NO: 258 - RNA, 22 nt, Artificial Sequence
  SAMD9L targeting guide sequence portion
augaagucaaagacguccugcg

SEQ ID NO: 259 - RNA, 22 nt, Artificial Sequence
  SAMD9L targeting guide sequence portion
caaagacguccugcgucgucua

SEQ ID NO: 260 - RNA, 22 nt, Artificial Sequence
  SAMD9L targeting guide sequence portion
cagccugaccaguuagacgacg

SEQ ID NO: 261 - RNA, 22 nt, Artificial Sequence
  SAMD9L targeting guide sequence portion
caggacgucuuugacuucauuu

SEQ ID NO: 262 - RNA, 22 nt, Artificial Sequence
  SAMD9L targeting guide sequence portion
caguuagacgacgcaggacguc

SEQ ID NO: 263 - RNA, 22 nt, Artificial Sequence
  SAMD9L targeting guide sequence portion
ccaguuagacgacgcaggacgu

SEQ ID NO: 264 - RNA, 22 nt, Artificial Sequence
  SAMD9L targeting guide sequence portion
ccugaccaguuagacgacgcag

SEQ ID NO: 265 - RNA, 22 nt, Artificial Sequence
  SAMD9L targeting guide sequence portion
cgacgcaggacgucuuugacuu

SEQ ID NO: 266 - RNA, 22 nt, Artificial Sequence
  SAMD9L targeting guide sequence portion
cgcaggacgucuuugacuucau

SEQ ID NO: 267 - RNA, 22 nt, Artificial Sequence
  SAMD9L targeting guide sequence portion
cguccugcgucgucuaacuggu

SEQ ID NO: 268 - RNA, 22 nt, Artificial Sequence
  SAMD9L targeting guide sequence portion
cugaccaguuagacgacgcagg

SEQ ID NO: 269 - RNA, 22 nt, Artificial Sequence
  SAMD9L targeting guide sequence portion
gaagucaaagacguccugcguc

SEQ ID NO: 270 - RNA, 22 nt, Artificial Sequence
  SAMD9L targeting guide sequence portion
gaccaguuagacgacgcaggac

SEQ ID NO: 271 - RNA, 22 nt, Artificial Sequence
  SAMD9L targeting guide sequence portion
gacgacgcaggacgucuuugac

SEQ ID NO: 272 - RNA, 22 nt, Artificial Sequence
  SAMD9L targeting guide sequence portion
gacgcaggacgucuuugacuuc

SEQ ID NO: 273 - RNA, 22 nt, Artificial Sequence
  SAMD9L targeting guide sequence portion
gacguccugcgucgucuaacug

SEQ ID NO: 274 - RNA, 22 nt, Artificial Sequence
  SAMD9L targeting guide sequence portion
gacgucuuugacuucauuuuuu

SEQ ID NO: 275 - RNA, 22 nt, Artificial Sequence
  SAMD9L targeting guide sequence portion
gcaggacgucuuugacuucauu

SEQ ID NO: 276 - RNA, 22 nt, Artificial Sequence
  SAMD9L targeting guide sequence portion
gccugaccaguuagacgacgca

SEQ ID NO: 277 - RNA, 22 nt, Artificial Sequence
  SAMD9L targeting guide sequence portion
ggacgucuuugacuucauuuuu

SEQ ID NO: 278 - RNA, 22 nt, Artificial Sequence
  SAMD9L targeting guide sequence portion
gucaaagacguccugcgucguc

SEQ ID NO: 279 - RNA, 22 nt, Artificial Sequence
  SAMD9L targeting guide sequence portion
guccugcgucgucuaacugguc

SEQ ID NO: 280 - RNA, 22 nt, Artificial Sequence
  SAMD9L targeting guide sequence portion
guuagacgacgcaggacgucuu

SEQ ID NO: 281 - RNA, 22 nt, Artificial Sequence
  SAMD9L targeting guide sequence portion
uagacgacgcaggacgucuuug

SEQ ID NO: 282 - RNA, 22 nt, Artificial Sequence
  SAMD9L targeting guide sequence portion
ucaaagacguccugcgucgucu

SEQ ID NO: 283 - RNA, 22 nt, Artificial Sequence
  SAMD9L targeting guide sequence portion
ugaagucaaagacguccugcgu

SEQ ID NO: 284 - RNA, 22 nt, Artificial Sequence
  SAMD9L targeting guide sequence portion
ugaccaguuagacgacgcagga

SEQ ID NO: 285 - RNA, 22 nt, Artificial Sequence
  SAMD9L targeting guide sequence portion
uuagacgacgcaggacgucuuu

SEQ ID NO: 286 - RNA, 20 nt, Artificial Sequence
  SAMD9L targeting guide sequence portion
aaauucccucuggcacagug

SEQ ID NO: 287 - RNA, 20 nt, Artificial Sequence
  SAMD9L targeting guide sequence portion
aauucccucuggcacagugg

SEQ ID NO: 288 - RNA, 20 nt, Artificial Sequence
  SAMD9L targeting guide sequence portion
acaguggggauauguggaaa

SEQ ID NO: 289 - RNA, 20 nt, Artificial Sequence
  SAMD9L targeting guide sequence portion
acauauccccacugugccag

SEQ ID NO: 290 - RNA, 20 nt, Artificial Sequence
  SAMD9L targeting guide sequence portion
aguggggauauguggaaaaa

SEQ ID NO: 291 - RNA, 20 nt, Artificial Sequence
  SAMD9L targeting guide sequence portion
auauccccacugugccagag

SEQ ID NO: 292 - RNA, 20 nt, Artificial Sequence
  SAMD9L targeting guide sequence portion
auucccucuggcacaguggg

SEQ ID NO: 293 - RNA, 20 nt, Artificial Sequence
  SAMD9L targeting guide sequence portion
cacaguggggauauguggaa

SEQ ID NO: 294 - RNA, 20 nt, Artificial Sequence
  SAMD9L targeting guide sequence portion
cacauauccccacugugcca

SEQ ID NO: 295 - RNA, 20 nt, Artificial Sequence
  SAMD9L targeting guide sequence portion
caguggggauauguggaaaa

SEQ ID NO: 296 - RNA, 20 nt, Artificial Sequence
  SAMD9L targeting guide sequence portion
cauauccccacugugccaga

SEQ ID NO: 297 - RNA, 20 nt, Artificial Sequence
  SAMD9L targeting guide sequence portion
ccacauauccccacugugcc

SEQ ID NO: 298 - RNA, 20 nt, Artificial Sequence
  SAMD9L targeting guide sequence portion
cccucuggcacaguggggau

SEQ ID NO: 299 - RNA, 20 nt, Artificial Sequence
  SAMD9L targeting guide sequence portion
ccucuggcacaguggggaua

SEQ ID NO: 300 - RNA, 20 nt, Artificial Sequence
  SAMD9L targeting guide sequence portion
cucuggcacaguggggauau

SEQ ID NO: 301 - RNA, 20 nt, Artificial Sequence
  SAMD9L targeting guide sequence portion
cuggcacaguggggauaugu

SEQ ID NO: 302 - RNA, 20 nt, Artificial Sequence
  SAMD9L targeting guide sequence portion
gcacaguggggauaugugga

SEQ ID NO: 303 - RNA, 20 nt, Artificial Sequence
  SAMD9L targeting guide sequence portion
ggcacaguggggauaugugg

SEQ ID NO: 304 - RNA, 20 nt, Artificial Sequence
  SAMD9L targeting guide sequence portion
guggggauauguggaaaaaa

SEQ ID NO: 305 - RNA, 20 nt, Artificial Sequence
  SAMD9L targeting guide sequence portion
uauccccacugugccagagg

SEQ ID NO: 306 - RNA, 20 nt, Artificial Sequence
  SAMD9L targeting guide sequence portion
uccacauauccccacugugc

SEQ ID NO: 307 - RNA, 20 nt, Artificial Sequence
  SAMD9L targeting guide sequence portion
ucccucuggcacagugggga

SEQ ID NO: 308 - RNA, 20 nt, Artificial Sequence
  SAMD9L targeting guide sequence portion
ucuggcacaguggggauaug

SEQ ID NO: 309 - RNA, 20 nt, Artificial Sequence
  SAMD9L targeting guide sequence portion
uggcacaguggggauaugug

SEQ ID NO: 310 - RNA, 20 nt, Artificial Sequence
  SAMD9L targeting guide sequence portion
uuccacauauccccacugug

SEQ ID NO: 311 - RNA, 20 nt, Artificial Sequence
  SAMD9L targeting guide sequence portion
uucccucuggcacagugggg

SEQ ID NO: 312 - RNA, 20 nt, Artificial Sequence
  SAMD9L targeting guide sequence portion
uuuccacauauccccacugu

SEQ ID NO: 313 - RNA, 20 nt, Artificial Sequence
  SAMD9L targeting guide sequence portion
uuuuccacauauccccacug

SEQ ID NO: 314 - RNA, 20 nt, Artificial Sequence
  SAMD9L targeting guide sequence portion
uuuuuccacauauccccacu

SEQ ID NO: 315 - RNA, 20 nt, Artificial Sequence
  SAMD9L targeting guide sequence portion
uuuuuuccacauauccccac

SEQ ID NO: 316 - RNA, 21 nt, Artificial Sequence
  SAMD9L targeting guide sequence portion
aaauucccucuggcacagugg

SEQ ID NO: 317 - RNA, 21 nt, Artificial Sequence
  SAMD9L targeting guide sequence portion
aauucccucuggcacaguggg

SEQ ID NO: 318 - RNA, 21 nt, Artificial Sequence
  SAMD9L targeting guide sequence portion
acaguggggauauguggaaaa

SEQ ID NO: 319 - RNA, 21 nt, Artificial Sequence
  SAMD9L targeting guide sequence portion
acauauccccacugugccaga

SEQ ID NO: 320 - RNA, 21 nt, Artificial Sequence
  SAMD9L targeting guide sequence portion
aguggggauauguggaaaaaa

SEQ ID NO: 321 - RNA, 21 nt, Artificial Sequence
  SAMD9L targeting guide sequence portion
auauccccacugugccagagg

SEQ ID NO: 322 - RNA, 21 nt, Artificial Sequence
  SAMD9L targeting guide sequence portion
auucccucuggcacagugggg

SEQ ID NO: 323 - RNA, 21 nt, Artificial Sequence
  SAMD9L targeting guide sequence portion
caaauucccucuggcacagug

SEQ ID NO: 324 - RNA, 21 nt, Artificial Sequence
  SAMD9L targeting guide sequence portion
cacaguggggauauguggaaa

SEQ ID NO: 325 - RNA, 21 nt, Artificial Sequence
  SAMD9L targeting guide sequence portion
cacauauccccacugugccag

SEQ ID NO: 326 - RNA, 21 nt, Artificial Sequence
  SAMD9L targeting guide sequence portion
caguggggauauguggaaaaa

SEQ ID NO: 327 - RNA, 21 nt, Artificial Sequence
  SAMD9L targeting guide sequence portion
cauauccccacugugccagag

SEQ ID NO: 328 - RNA, 21 nt, Artificial Sequence
  SAMD9L targeting guide sequence portion
ccacauauccccacugugcca

SEQ ID NO: 329 - RNA, 21 nt, Artificial Sequence
  SAMD9L targeting guide sequence portion
cccucuggcacaguggggaua

SEQ ID NO: 330 - RNA, 21 nt, Artificial Sequence
  SAMD9L targeting guide sequence portion
ccucuggcacaguggggauau

SEQ ID NO: 331 - RNA, 21 nt, Artificial Sequence
  SAMD9L targeting guide sequence portion
cucuggcacaguggggauaug

SEQ ID NO: 332 - RNA, 21 nt, Artificial Sequence
  SAMD9L targeting guide sequence portion
cuggcacaguggggauaugug

SEQ ID NO: 333 - RNA, 21 nt, Artificial Sequence
  SAMD9L targeting guide sequence portion
gcacaguggggauauguggaa

SEQ ID NO: 334 - RNA, 21 nt, Artificial Sequence
  SAMD9L targeting guide sequence portion
ggcacaguggggauaugugga

SEQ ID NO: 335 - RNA, 21 nt, Artificial Sequence
  SAMD9L targeting guide sequence portion
uauccccacugugccagaggg

SEQ ID NO: 336 - RNA, 21 nt, Artificial Sequence
  SAMD9L targeting guide sequence portion
uccacauauccccacugugcc

SEQ ID NO: 337 - RNA, 21 nt, Artificial Sequence
  SAMD9L targeting guide sequence portion
ucccucuggcacaguggggau

SEQ ID NO: 338 - RNA, 21 nt, Artificial Sequence
  SAMD9L targeting guide sequence portion
ucuggcacaguggggauaugu

SEQ ID NO: 339 - RNA, 21 nt, Artificial Sequence
  SAMD9L targeting guide sequence portion
uggcacaguggggauaugugg

SEQ ID NO: 340 - RNA, 21 nt, Artificial Sequence
  SAMD9L targeting guide sequence portion
uuccacauauccccacugugc

SEQ ID NO: 341 - RNA, 21 nt, Artificial Sequence
  SAMD9L targeting guide sequence portion
uucccucuggcacagugggga

SEQ ID NO: 342 - RNA, 21 nt, Artificial Sequence
  SAMD9L targeting guide sequence portion
uuuccacauauccccacugug

SEQ ID NO: 343 - RNA, 21 nt, Artificial Sequence
  SAMD9L targeting guide sequence portion
uuuuccacauauccccacugu

SEQ ID NO: 344 - RNA, 21 nt, Artificial Sequence
  SAMD9L targeting guide sequence portion
uuuuuccacauauccccacug

SEQ ID NO: 345 - RNA, 21 nt, Artificial Sequence
  SAMD9L targeting guide sequence portion
uuuuuuccacauauccccacu

SEQ ID NO: 346 - RNA, 22 nt, Artificial Sequence
  SAMD9L targeting guide sequence portion
aaauucccucuggcacaguggg

SEQ ID NO: 347 - RNA, 22 nt, Artificial Sequence
  SAMD9L targeting guide sequence portion
aauucccucuggcacagugggg

SEQ ID NO: 348 - RNA, 22 nt, Artificial Sequence
  SAMD9L targeting guide sequence portion
acaaauucccucuggcacagug

SEQ ID NO: 349 - RNA, 22 nt, Artificial Sequence
  SAMD9L targeting guide sequence portion
acaguggggauauguggaaaaa

SEQ ID NO: 350 - RNA, 22 nt, Artificial Sequence
  SAMD9L targeting guide sequence portion
acauauccccacugugccagag

SEQ ID NO: 351 - RNA, 22 nt, Artificial Sequence
  SAMD9L targeting guide sequence portion
auauccccacugugccagaggg

SEQ ID NO: 352 - RNA, 22 nt, Artificial Sequence
  SAMD9L targeting guide sequence portion
auucccucuggcacagugggga

SEQ ID NO: 353 - RNA, 22 nt, Artificial Sequence
  SAMD9L targeting guide sequence portion
caaauucccucuggcacagugg

SEQ ID NO: 354 - RNA, 22 nt, Artificial Sequence
  SAMD9L targeting guide sequence portion
cacaguggggauauguggaaaa

SEQ ID NO: 355 - RNA, 22 nt, Artificial Sequence
  SAMD9L targeting guide sequence portion
cacauauccccacugugccaga

SEQ ID NO: 356 - RNA, 22 nt, Artificial Sequence
  SAMD9L targeting guide sequence portion
caguggggauauguggaaaaaa

SEQ ID NO: 357 - RNA, 22 nt, Artificial Sequence
  SAMD9L targeting guide sequence portion
cauauccccacugugccagagg

SEQ ID NO: 358 - RNA, 22 nt, Artificial Sequence
  SAMD9L targeting guide sequence portion
ccacauauccccacugugccag

SEQ ID NO: 359 - RNA, 22 nt, Artificial Sequence
  SAMD9L targeting guide sequence portion
cccucuggcacaguggggauau

SEQ ID NO: 360 - RNA, 22 nt, Artificial Sequence
  SAMD9L targeting guide sequence portion
ccucuggcacaguggggauaug

SEQ ID NO: 361 - RNA, 22 nt, Artificial Sequence
  SAMD9L targeting guide sequence portion
cucuggcacaguggggauaugu

SEQ ID NO: 362 - RNA, 22 nt, Artificial Sequence
  SAMD9L targeting guide sequence portion
cuggcacaguggggauaugugg

SEQ ID NO: 363 - RNA, 22 nt, Artificial Sequence
  SAMD9L targeting guide sequence portion
gcacaguggggauauguggaaa

SEQ ID NO: 364 - RNA, 22 nt, Artificial Sequence
  SAMD9L targeting guide sequence portion
ggcacaguggggauauguggaa

SEQ ID NO: 365 - RNA, 22 nt, Artificial Sequence
  SAMD9L targeting guide sequence portion
uauccccacugugccagaggga

SEQ ID NO: 366 - RNA, 22 nt, Artificial Sequence
  SAMD9L targeting guide sequence portion
uccacauauccccacugugcca

SEQ ID NO: 367 - RNA, 22 nt, Artificial Sequence
  SAMD9L targeting guide sequence portion
ucccucuggcacaguggggaua

SEQ ID NO: 368 - RNA, 22 nt, Artificial Sequence
  SAMD9L targeting guide sequence portion
ucuggcacaguggggauaugug

SEQ ID NO: 369 - RNA, 22 nt, Artificial Sequence
  SAMD9L targeting guide sequence portion
uggcacaguggggauaugugga

SEQ ID NO: 370 - RNA, 22 nt, Artificial Sequence
  SAMD9L targeting guide sequence portion
uuccacauauccccacugugcc

SEQ ID NO: 371 - RNA, 22 nt, Artificial Sequence
  SAMD9L targeting guide sequence portion
uucccucuggcacaguggggau

SEQ ID NO: 372 - RNA, 22 nt, Artificial Sequence
  SAMD9L targeting guide sequence portion
uuuccacauauccccacugugc

SEQ ID NO: 373 - RNA, 22 nt, Artificial Sequence
  SAMD9L targeting guide sequence portion
uuuuccacauauccccacugug

SEQ ID NO: 374 - RNA, 22 nt, Artificial Sequence
  SAMD9L targeting guide sequence portion
uuuuuccacauauccccacugu

SEQ ID NO: 375 - RNA, 22 nt, Artificial Sequence
  SAMD9L targeting guide sequence portion
uuuuuuccacauauccccacug

SEQ ID NO: 376 - RNA, 20 nt, Artificial Sequence
  SAMD9L targeting guide sequence portion
aaacaguauuguucacaagg

SEQ ID NO: 377 - RNA, 20 nt, Artificial Sequence
  SAMD9L targeting guide sequence portion
aaaguacugcucuacuuugg

SEQ ID NO: 378 - RNA, 20 nt, Artificial Sequence
  SAMD9L targeting guide sequence portion
aaaguagagcaguacuuuga

SEQ ID NO: 379 - RNA, 20 nt, Artificial Sequence
  SAMD9L targeting guide sequence portion
aacaguauuguucacaaggc

SEQ ID NO: 380 - RNA, 20 nt, Artificial Sequence
  SAMD9L targeting guide sequence portion
aaggccaaaguagagcagua

SEQ ID NO: 381 - RNA, 20 nt, Artificial Sequence
  SAMD9L targeting guide sequence portion
aaguacugcucuacuuuggc

SEQ ID NO: 382 - RNA, 20 nt, Artificial Sequence
  SAMD9L targeting guide sequence portion
aaguagagcaguacuuugau

SEQ ID NO: 383 - RNA, 20 nt, Artificial Sequence
  SAMD9L targeting guide sequence portion
acaaggccaaaguagagcag

SEQ ID NO: 384 - RNA, 20 nt, Artificial Sequence
  SAMD9L targeting guide sequence portion
acaguauuguucacaaggcc

SEQ ID NO: 385 - RNA, 20 nt, Artificial Sequence
  SAMD9L targeting guide sequence portion
acugcucuacuuuggccuug

SEQ ID NO: 386 - RNA, 20 nt, Artificial Sequence
  SAMD9L targeting guide sequence portion
acuuuggccuugugaacaau

SEQ ID NO: 387 - RNA, 20 nt, Artificial Sequence
  SAMD9L targeting guide sequence portion
aggccaaaguagagcaguac

SEQ ID NO: 388 - RNA, 20 nt, Artificial Sequence
  SAMD9L targeting guide sequence portion
aguacugcucuacuuuggcc

SEQ ID NO: 389 - RNA, 20 nt, Artificial Sequence
  SAMD9L targeting guide sequence portion
aguagagcaguacuuugaua

SEQ ID NO: 390 - RNA, 20 nt, Artificial Sequence
  SAMD9L targeting guide sequence portion
aguauuguucacaaggccaa

SEQ ID NO: 391 - RNA, 20 nt, Artificial Sequence
  SAMD9L targeting guide sequence portion
aucaaaguacugcucuacuu

SEQ ID NO: 392 - RNA, 20 nt, Artificial Sequence
  SAMD9L targeting guide sequence portion
auuguucacaaggccaaagu

SEQ ID NO: 393 - RNA, 20 nt, Artificial Sequence
  SAMD9L targeting guide sequence portion
caaaguacugcucuacuuug

SEQ ID NO: 394 - RNA, 20 nt, Artificial Sequence
  SAMD9L targeting guide sequence portion
caaaguagagcaguacuuug

SEQ ID NO: 395 - RNA, 20 nt, Artificial Sequence
  SAMD9L targeting guide sequence portion
caaggccaaaguagagcagu

SEQ ID NO: 396 - RNA, 20 nt, Artificial Sequence
  SAMD9L targeting guide sequence portion
cacaaggccaaaguagagca

SEQ ID NO: 397 - RNA, 20 nt, Artificial Sequence
  SAMD9L targeting guide sequence portion
caguauuguucacaaggcca

SEQ ID NO: 398 - RNA, 20 nt, Artificial Sequence
  SAMD9L targeting guide sequence portion
ccaaaguagagcaguacuuu

SEQ ID NO: 399 - RNA, 20 nt, Artificial Sequence
  SAMD9L targeting guide sequence portion
cuacuuuggccuugugaaca

SEQ ID NO: 400 - RNA, 20 nt, Artificial Sequence
  SAMD9L targeting guide sequence portion
cucuacuuuggccuugugaa

SEQ ID NO: 401 - RNA, 20 nt, Artificial Sequence
  SAMD9L targeting guide sequence portion
cugcucuacuuuggccuugu

SEQ ID NO: 402 - RNA, 20 nt, Artificial Sequence
  SAMD9L targeting guide sequence portion
cuuuaucaaaguacugcucu

SEQ ID NO: 403 - RNA, 20 nt, Artificial Sequence
  SAMD9L targeting guide sequence portion
cuuuggccuugugaacaaua

SEQ ID NO: 404 - RNA, 20 nt, Artificial Sequence
  SAMD9L targeting guide sequence portion
gccaaaguagagcaguacuu

SEQ ID NO: 405 - RNA, 20 nt, Artificial Sequence
  SAMD9L targeting guide sequence portion
gcucuacuuuggccuuguga

SEQ ID NO: 406 - RNA, 20 nt, Artificial Sequence
  SAMD9L targeting guide sequence portion
gcuuuaucaaaguacugcuc

SEQ ID NO: 407 - RNA, 20 nt, Artificial Sequence
  SAMD9L targeting guide sequence portion
ggccaaaguagagcaguacu

SEQ ID NO: 408 - RNA, 20 nt, Artificial Sequence
  SAMD9L targeting guide sequence portion
guacugcucuacuuuggccu

SEQ ID NO: 409 - RNA, 20 nt, Artificial Sequence
  SAMD9L targeting guide sequence portion
guagagcaguacuuugauaa

SEQ ID NO: 410 - RNA, 20 nt, Artificial Sequence
  SAMD9L targeting guide sequence portion
guauuguucacaaggccaaa

SEQ ID NO: 411 - RNA, 20 nt, Artificial Sequence
  SAMD9L targeting guide sequence portion
gugcuuuaucaaaguacugc

SEQ ID NO: 412 - RNA, 20 nt, Artificial Sequence
  SAMD9L targeting guide sequence portion
guucacaaggccaaaguaga

SEQ ID NO: 413 - RNA, 20 nt, Artificial Sequence
  SAMD9L targeting guide sequence portion
uacugcucuacuuuggccuu

SEQ ID NO: 414 - RNA, 20 nt, Artificial Sequence
  SAMD9L targeting guide sequence portion
uacuuuggccuugugaacaa

SEQ ID NO: 415 - RNA, 20 nt, Artificial Sequence
  SAMD9L targeting guide sequence portion
uaucaaaguacugcucuacu

SEQ ID NO: 416 - RNA, 20 nt, Artificial Sequence
  SAMD9L targeting guide sequence portion
uauuguucacaaggccaaag

SEQ ID NO: 417 - RNA, 20 nt, Artificial Sequence
  SAMD9L targeting guide sequence portion
ucaaaguacugcucuacuuu

SEQ ID NO: 418 - RNA, 20 nt, Artificial Sequence
  SAMD9L targeting guide sequence portion
ucacaaggccaaaguagagc

SEQ ID NO: 419 - RNA, 20 nt, Artificial Sequence
  SAMD9L targeting guide sequence portion
ucuacuuuggccuugugaac

SEQ ID NO: 420 - RNA, 20 nt, Artificial Sequence
  SAMD9L targeting guide sequence portion
ugcucuacuuuggccuugug

SEQ ID NO: 421 - RNA, 20 nt, Artificial Sequence
  SAMD9L targeting guide sequence portion
ugcuuuaucaaaguacugcu

SEQ ID NO: 422 - RNA, 20 nt, Artificial Sequence
  SAMD9L targeting guide sequence portion
ugugcuuuaucaaaguacug

SEQ ID NO: 423 - RNA, 20 nt, Artificial Sequence
  SAMD9L targeting guide sequence portion
uguucacaaggccaaaguag

SEQ ID NO: 424 - RNA, 20 nt, Artificial Sequence
  SAMD9L targeting guide sequence portion
uuaucaaaguacugcucuac

SEQ ID NO: 425 - RNA, 20 nt, Artificial Sequence
  SAMD9L targeting guide sequence portion
uucacaaggccaaaguagag

SEQ ID NO: 426 - RNA, 20 nt, Artificial Sequence
  SAMD9L targeting guide sequence portion
uuguucacaaggccaaagua

SEQ ID NO: 427 - RNA, 20 nt, Artificial Sequence
  SAMD9L targeting guide sequence portion
uuuaucaaaguacugcucua

SEQ ID NO: 428 - RNA, 21 nt, Artificial Sequence
  SAMD9L targeting guide sequence portion
aaacaguauuguucacaaggc

SEQ ID NO: 429 - RNA, 21 nt, Artificial Sequence
  SAMD9L targeting guide sequence portion
aaaguacugcucuacuuuggc

SEQ ID NO: 430 - RNA, 21 nt, Artificial Sequence
  SAMD9L targeting guide sequence portion
aaaguagagcaguacuuugau

SEQ ID NO: 431 - RNA, 21 nt, Artificial Sequence
  SAMD9L targeting guide sequence portion
aacaguauuguucacaaggcc

SEQ ID NO: 432 - RNA, 21 nt, Artificial Sequence
  SAMD9L targeting guide sequence portion
aaggccaaaguagagcaguac

SEQ ID NO: 433 - RNA, 21 nt, Artificial Sequence
  SAMD9L targeting guide sequence portion
aaguacugcucuacuuuggcc

SEQ ID NO: 434 - RNA, 21 nt, Artificial Sequence
  SAMD9L targeting guide sequence portion
aaguagagcaguacuuugaua

SEQ ID NO: 435 - RNA, 21 nt, Artificial Sequence
  SAMD9L targeting guide sequence portion
acaaggccaaaguagagcagu

SEQ ID NO: 436 - RNA, 21 nt, Artificial Sequence
  SAMD9L targeting guide sequence portion
acaguauuguucacaaggcca

SEQ ID NO: 437 - RNA, 21 nt, Artificial Sequence
  SAMD9L targeting guide sequence portion
acugcucuacuuuggccuugu

SEQ ID NO: 438 - RNA, 21 nt, Artificial Sequence
  SAMD9L targeting guide sequence portion
acuuuggccuugugaacaaua

SEQ ID NO: 439 - RNA, 21 nt, Artificial Sequence
  SAMD9L targeting guide sequence portion
aggccaaaguagagcaguacu

SEQ ID NO: 440 - RNA, 21 nt, Artificial Sequence
  SAMD9L targeting guide sequence portion
aguacugcucuacuuuggccu

SEQ ID NO: 441 - RNA, 21 nt, Artificial Sequence
  SAMD9L targeting guide sequence portion
aguagagcaguacuuugauaa

SEQ ID NO: 442 - RNA, 21 nt, Artificial Sequence
  SAMD9L targeting guide sequence portion
aguauuguucacaaggccaaa

SEQ ID NO: 443 - RNA, 21 nt, Artificial Sequence
  SAMD9L targeting guide sequence portion
aucaaaguacugcucuacuuu

SEQ ID NO: 444 - RNA, 21 nt, Artificial Sequence
  SAMD9L targeting guide sequence portion
auuguucacaaggccaaagua

SEQ ID NO: 445 - RNA, 21 nt, Artificial Sequence
  SAMD9L targeting guide sequence portion
caaaguacugcucuacuuugg

SEQ ID NO: 446 - RNA, 21 nt, Artificial Sequence
  SAMD9L targeting guide sequence portion
caaaguagagcaguacuuuga

SEQ ID NO: 447 - RNA, 21 nt, Artificial Sequence
  SAMD9L targeting guide sequence portion
caaggccaaaguagagcagua

SEQ ID NO: 448 - RNA, 21 nt, Artificial Sequence
  SAMD9L targeting guide sequence portion
cacaaggccaaaguagagcag

SEQ ID NO: 449 - RNA, 21 nt, Artificial Sequence
  SAMD9L targeting guide sequence portion
caguauuguucacaaggccaa

SEQ ID NO: 450 - RNA, 21 nt, Artificial Sequence
  SAMD9L targeting guide sequence portion
ccaaaguagagcaguacuuug

SEQ ID NO: 451 - RNA, 21 nt, Artificial Sequence
  SAMD9L targeting guide sequence portion
cuacuuuggccuugugaacaa

SEQ ID NO: 452 - RNA, 21 nt, Artificial Sequence
  SAMD9L targeting guide sequence portion
cucuacuuuggccuugugaac

SEQ ID NO: 453 - RNA, 21 nt, Artificial Sequence
  SAMD9L targeting guide sequence portion
cugcucuacuuuggccuugug

SEQ ID NO: 454 - RNA, 21 nt, Artificial Sequence
  SAMD9L targeting guide sequence portion
cuuuaucaaaguacugcucua

SEQ ID NO: 455 - RNA, 21 nt, Artificial Sequence
  SAMD9L targeting guide sequence portion
cuuuggccuugugaacaauac

SEQ ID NO: 456 - RNA, 21 nt, Artificial Sequence
  SAMD9L targeting guide sequence portion
gccaaaguagagcaguacuuu

SEQ ID NO: 457 - RNA, 21 nt, Artificial Sequence
  SAMD9L targeting guide sequence portion
gcucuacuuuggccuugugaa

SEQ ID NO: 458 - RNA, 21 nt, Artificial Sequence
  SAMD9L targeting guide sequence portion
gcuuuaucaaaguacugcucu

SEQ ID NO: 459 - RNA, 21 nt, Artificial Sequence
  SAMD9L targeting guide sequence portion
ggccaaaguagagcaguacuu

SEQ ID NO: 460 - RNA, 21 nt, Artificial Sequence
  SAMD9L targeting guide sequence portion
guacugcucuacuuuggccuu

SEQ ID NO: 461 - RNA, 21 nt, Artificial Sequence
  SAMD9L targeting guide sequence portion
guagagcaguacuuugauaaa

SEQ ID NO: 462 - RNA, 21 nt, Artificial Sequence
  SAMD9L targeting guide sequence portion
guauuguucacaaggccaaag

SEQ ID NO: 463 - RNA, 21 nt, Artificial Sequence
  SAMD9L targeting guide sequence portion
gugcuuuaucaaaguacugcu

SEQ ID NO: 464 - RNA, 21 nt, Artificial Sequence
  SAMD9L targeting guide sequence portion
guucacaaggccaaaguagag

SEQ ID NO: 465 - RNA, 21 nt, Artificial Sequence
  SAMD9L targeting guide sequence portion
uaaacaguauuguucacaagg

SEQ ID NO: 466 - RNA, 21 nt, Artificial Sequence
  SAMD9L targeting guide sequence portion
uacugcucuacuuuggccuug

SEQ ID NO: 467 - RNA, 21 nt, Artificial Sequence
  SAMD9L targeting guide sequence portion
uacuuuggccuugugaacaau

SEQ ID NO: 468 - RNA, 21 nt, Artificial Sequence
  SAMD9L targeting guide sequence portion
uaucaaaguacugcucuacuu

SEQ ID NO: 469 - RNA, 21 nt, Artificial Sequence
  SAMD9L targeting guide sequence portion
uauuguucacaaggccaaagu

SEQ ID NO: 470 - RNA, 21 nt, Artificial Sequence
  SAMD9L targeting guide sequence portion
ucaaaguacugcucuacuuug

SEQ ID NO: 471 - RNA, 21 nt, Artificial Sequence
  SAMD9L targeting guide sequence portion
ucacaaggccaaaguagagca

SEQ ID NO: 472 - RNA, 21 nt, Artificial Sequence
  SAMD9L targeting guide sequence portion
ucuacuuuggccuugugaaca

SEQ ID NO: 473 - RNA, 21 nt, Artificial Sequence
  SAMD9L targeting guide sequence portion
ugcucuacuuuggccuuguga

SEQ ID NO: 474 - RNA, 21 nt, Artificial Sequence
  SAMD9L targeting guide sequence portion
ugcuuuaucaaaguacugcuc

SEQ ID NO: 475 - RNA, 21 nt, Artificial Sequence
  SAMD9L targeting guide sequence portion
ugugcuuuaucaaaguacugc

SEQ ID NO: 476 - RNA, 21 nt, Artificial Sequence
  SAMD9L targeting guide sequence portion
uguucacaaggccaaaguaga

SEQ ID NO: 477 - RNA, 21 nt, Artificial Sequence
  SAMD9L targeting guide sequence portion
uuaucaaaguacugcucuacu

SEQ ID NO: 478 - RNA, 21 nt, Artificial Sequence
  SAMD9L targeting guide sequence portion
uucacaaggccaaaguagagc

SEQ ID NO: 479 - RNA, 21 nt, Artificial Sequence
  SAMD9L targeting guide sequence portion
uugugcuuuaucaaaguacug

SEQ ID NO: 480 - RNA, 21 nt, Artificial Sequence
  SAMD9L targeting guide sequence portion
uuguucacaaggccaaaguag

SEQ ID NO: 481 - RNA, 21 nt, Artificial Sequence
  SAMD9L targeting guide sequence portion
uuuaucaaaguacugcucuac

SEQ ID NO: 482 - RNA, 22 nt, Artificial Sequence
  SAMD9L targeting guide sequence portion
aaacaguauuguucacaaggcc

SEQ ID NO: 483 - RNA, 22 nt, Artificial Sequence
  SAMD9L targeting guide sequence portion
aaaguacugcucuacuuuggcc

SEQ ID NO: 484 - RNA, 22 nt, Artificial Sequence
  SAMD9L targeting guide sequence portion
aaaguagagcaguacuuugaua

SEQ ID NO: 485 - RNA, 22 nt, Artificial Sequence
  SAMD9L targeting guide sequence portion
aacaguauuguucacaaggcca

SEQ ID NO: 486 - RNA, 22 nt, Artificial Sequence
  SAMD9L targeting guide sequence portion
aaggccaaaguagagcaguacu

SEQ ID NO: 487 - RNA, 22 nt, Artificial Sequence
  SAMD9L targeting guide sequence portion
aaguacugcucuacuuuggccu

SEQ ID NO: 488 - RNA, 22 nt, Artificial Sequence
  SAMD9L targeting guide sequence portion
aaguagagcaguacuuugauaa

SEQ ID NO: 489 - RNA, 22 nt, Artificial Sequence
  SAMD9L targeting guide sequence portion
acaaggccaaaguagagcagua

SEQ ID NO: 490 - RNA, 22 nt, Artificial Sequence
  SAMD9L targeting guide sequence portion
acaguauuguucacaaggccaa

SEQ ID NO: 491 - RNA, 22 nt, Artificial Sequence
  SAMD9L targeting guide sequence portion
acugcucuacuuuggccuugug

SEQ ID NO: 492 - RNA, 22 nt, Artificial Sequence
  SAMD9L targeting guide sequence portion
acuuuggccuugugaacaauac

SEQ ID NO: 493 - RNA, 22 nt, Artificial Sequence
  SAMD9L targeting guide sequence portion
aggccaaaguagagcaguacuu

SEQ ID NO: 494 - RNA, 22 nt, Artificial Sequence
  SAMD9L targeting guide sequence portion
aguacugcucuacuuuggccuu

SEQ ID NO: 495 - RNA, 22 nt, Artificial Sequence
  SAMD9L targeting guide sequence portion
aguagagcaguacuuugauaaa

SEQ ID NO: 496 - RNA, 22 nt, Artificial Sequence
  SAMD9L targeting guide sequence portion
aguauuguucacaaggccaaag

SEQ ID NO: 497 - RNA, 22 nt, Artificial Sequence
  SAMD9L targeting guide sequence portion
aucaaaguacugcucuacuuug

SEQ ID NO: 498 - RNA, 22 nt, Artificial Sequence
  SAMD9L targeting guide sequence portion
auuguucacaaggccaaaguag

SEQ ID NO: 499 - RNA, 22 nt, Artificial Sequence
  SAMD9L targeting guide sequence portion
caaaguacugcucuacuuuggc

SEQ ID NO: 500 - RNA, 22 nt, Artificial Sequence
  SAMD9L targeting guide sequence portion
caaaguagagcaguacuuugau

SEQ ID NO: 501 - RNA, 22 nt, Artificial Sequence
  SAMD9L targeting guide sequence portion
caaggccaaaguagagcaguac

SEQ ID NO: 502 - RNA, 22 nt, Artificial Sequence
  SAMD9L targeting guide sequence portion
cacaaggccaaaguagagcagu

SEQ ID NO: 503 - RNA, 22 nt, Artificial Sequence
  SAMD9L targeting guide sequence portion
caguauuguucacaaggccaaa

SEQ ID NO: 504 - RNA, 22 nt, Artificial Sequence
  SAMD9L targeting guide sequence portion
ccaaaguagagcaguacuuuga

SEQ ID NO: 505 - RNA, 22 nt, Artificial Sequence
  SAMD9L targeting guide sequence portion
cuaaacaguauuguucacaagg

SEQ ID NO: 506 - RNA, 22 nt, Artificial Sequence
  SAMD9L targeting guide sequence portion
cuacuuuggccuugugaacaau

SEQ ID NO: 507 - RNA, 22 nt, Artificial Sequence
  SAMD9L targeting guide sequence portion
cucuacuuuggccuugugaaca

SEQ ID NO: 508 - RNA, 22 nt, Artificial Sequence
  SAMD9L targeting guide sequence portion
cugcucuacuuuggccuuguga

SEQ ID NO: 509 - RNA, 22 nt, Artificial Sequence
  SAMD9L targeting guide sequence portion
cuuuaucaaaguacugcucuac

SEQ ID NO: 510 - RNA, 22 nt, Artificial Sequence
  SAMD9L targeting guide sequence portion
cuuuggccuugugaacaauacu

SEQ ID NO: 511 - RNA, 22 nt, Artificial Sequence
  SAMD9L targeting guide sequence portion
gccaaaguagagcaguacuuug

SEQ ID NO: 512 - RNA, 22 nt, Artificial Sequence
  SAMD9L targeting guide sequence portion
gcucuacuuuggccuugugaac

SEQ ID NO: 513 - RNA, 22 nt, Artificial Sequence
  SAMD9L targeting guide sequence portion
gcuuuaucaaaguacugcucua

SEQ ID NO: 514 - RNA, 22 nt, Artificial Sequence
  SAMD9L targeting guide sequence portion
ggccaaaguagagcaguacuuu

SEQ ID NO: 515 - RNA, 22 nt, Artificial Sequence
  SAMD9L targeting guide sequence portion
guacugcucuacuuuggccuug

SEQ ID NO: 516 - RNA, 22 nt, Artificial Sequence
  SAMD9L targeting guide sequence portion
guagagcaguacuuugauaaag

SEQ ID NO: 517 - RNA, 22 nt, Artificial Sequence
  SAMD9L targeting guide sequence portion
guauuguucacaaggccaaagu

SEQ ID NO: 518 - RNA, 22 nt, Artificial Sequence
  SAMD9L targeting guide sequence portion
gugcuuuaucaaaguacugcuc

SEQ ID NO: 519 - RNA, 22 nt, Artificial Sequence
  SAMD9L targeting guide sequence portion
guucacaaggccaaaguagagc

SEQ ID NO: 520 - RNA, 22 nt, Artificial Sequence
  SAMD9L targeting guide sequence portion
uaaacaguauuguucacaaggc

SEQ ID NO: 521 - RNA, 22 nt, Artificial Sequence
  SAMD9L targeting guide sequence portion
uacugcucuacuuuggccuugu

SEQ ID NO: 522 - RNA, 22 nt, Artificial Sequence
  SAMD9L targeting guide sequence portion
uacuuuggccuugugaacaaua

SEQ ID NO: 523 - RNA, 22 nt, Artificial Sequence
  SAMD9L targeting guide sequence portion
uaucaaaguacugcucuacuuu

SEQ ID NO: 524 - RNA, 22 nt, Artificial Sequence
  SAMD9L targeting guide sequence portion
uauuguucacaaggccaaagua

SEQ ID NO: 525 - RNA, 22 nt, Artificial Sequence
  SAMD9L targeting guide sequence portion
ucaaaguacugcucuacuuugg

SEQ ID NO: 526 - RNA, 22 nt, Artificial Sequence
  SAMD9L targeting guide sequence portion
ucacaaggccaaaguagagcag

SEQ ID NO: 527 - RNA, 22 nt, Artificial Sequence
  SAMD9L targeting guide sequence portion
ucuacuuuggccuugugaacaa

SEQ ID NO: 528 - RNA, 22 nt, Artificial Sequence
  SAMD9L targeting guide sequence portion
ugcucuacuuuggccuugugaa

SEQ ID NO: 529 - RNA, 22 nt, Artificial Sequence
  SAMD9L targeting guide sequence portion
ugcuuuaucaaaguacugcucu

SEQ ID NO: 530 - RNA, 22 nt, Artificial Sequence
  SAMD9L targeting guide sequence portion
ugugcuuuaucaaaguacugcu

SEQ ID NO: 531 - RNA, 22 nt, Artificial Sequence
  SAMD9L targeting guide sequence portion
uguucacaaggccaaaguagag

SEQ ID NO: 532 - RNA, 22 nt, Artificial Sequence
  SAMD9L targeting guide sequence portion
uuaucaaaguacugcucuacuu

SEQ ID NO: 533 - RNA, 22 nt, Artificial Sequence
  SAMD9L targeting guide sequence portion
uucacaaggccaaaguagagca

SEQ ID NO: 534 - RNA, 22 nt, Artificial Sequence
  SAMD9L targeting guide sequence portion
uugugcuuuaucaaaguacugc

SEQ ID NO: 535 - RNA, 22 nt, Artificial Sequence
  SAMD9L targeting guide sequence portion
uuguucacaaggccaaaguaga

SEQ ID NO: 536 - RNA, 22 nt, Artificial Sequence
  SAMD9L targeting guide sequence portion
uuuaucaaaguacugcucuacu

SEQ ID NO: 537 - RNA, 22 nt, Artificial Sequence
  SAMD9L targeting guide sequence portion
uuugugcuuuaucaaaguacug

SEQ ID NO: 538 - RNA, 20 nt, Artificial Sequence
  SAMD9L targeting guide sequence portion
aaacaaccacugacuuucuu

SEQ ID NO: 539 - RNA, 20 nt, Artificial Sequence
  SAMD9L targeting guide sequence portion
aaagucagugguuguuucag

SEQ ID NO: 540 - RNA, 20 nt, Artificial Sequence
  SAMD9L targeting guide sequence portion
aacaaccacugacuuucuug

SEQ ID NO: 541 - RNA, 20 nt, Artificial Sequence
  SAMD9L targeting guide sequence portion
aaccacugacuuucuugcuu

SEQ ID NO: 542 - RNA, 20 nt, Artificial Sequence
  SAMD9L targeting guide sequence portion
aagaaagucagugguuguuu

SEQ ID NO: 543 - RNA, 20 nt, Artificial Sequence
  SAMD9L targeting guide sequence portion
aagcaagaaagucagugguu

SEQ ID NO: 544 - RNA, 20 nt, Artificial Sequence
  SAMD9L targeting guide sequence portion
aagucagugguuguuucagg

SEQ ID NO: 545 - RNA, 20 nt, Artificial Sequence
  SAMD9L targeting guide sequence portion
aaucauguuaagcaagaaag

SEQ ID NO: 546 - RNA, 20 nt, Artificial Sequence
  SAMD9L targeting guide sequence portion
acaaccacugacuuucuugc

SEQ ID NO: 547 - RNA, 20 nt, Artificial Sequence
  SAMD9L targeting guide sequence portion
accacugacuuucuugcuua

SEQ ID NO: 548 - RNA, 20 nt, Artificial Sequence
  SAMD9L targeting guide sequence portion
agaaagucagugguuguuuc

SEQ ID NO: 549 - RNA, 20 nt, Artificial Sequence
  SAMD9L targeting guide sequence portion
agcaagaaagucagugguug

SEQ ID NO: 550 - RNA, 20 nt, Artificial Sequence
  SAMD9L targeting guide sequence portion
agucagugguuguuucagga

SEQ ID NO: 551 - RNA, 20 nt, Artificial Sequence
  SAMD9L targeting guide sequence portion
agugguuguuucaggaaaua

SEQ ID NO: 552 - RNA, 20 nt, Artificial Sequence
  SAMD9L targeting guide sequence portion
aguucuguguauuuccugaa

SEQ ID NO: 553 - RNA, 20 nt, Artificial Sequence
  SAMD9L targeting guide sequence portion
aucauguuaagcaagaaagu

SEQ ID NO: 554 - RNA, 20 nt, Artificial Sequence
  SAMD9L targeting guide sequence portion
auguuaagcaagaaagucag

SEQ ID NO: 555 - RNA, 20 nt, Artificial Sequence
  SAMD9L targeting guide sequence portion
auuuccugaaacaaccacug

SEQ ID NO: 556 - RNA, 20 nt, Artificial Sequence
  SAMD9L targeting guide sequence portion
caaccacugacuuucuugcu

SEQ ID NO: 557 - RNA, 20 nt, Artificial Sequence
  SAMD9L targeting guide sequence portion
caagaaagucagugguuguu

SEQ ID NO: 558 - RNA, 20 nt, Artificial Sequence
  SAMD9L targeting guide sequence portion
cacugacuuucuugcuuaac

SEQ ID NO: 559 - RNA, 20 nt, Artificial Sequence
  SAMD9L targeting guide sequence portion
cagugguuguuucaggaaau

SEQ ID NO: 560 - RNA, 20 nt, Artificial Sequence
  SAMD9L targeting guide sequence portion
cauguuaagcaagaaaguca

SEQ ID NO: 561 - RNA, 20 nt, Artificial Sequence
  SAMD9L targeting guide sequence portion
ccacugacuuucuugcuuaa

SEQ ID NO: 562 - RNA, 20 nt, Artificial Sequence
  SAMD9L targeting guide sequence portion
ccugaaacaaccacugacuu

SEQ ID NO: 563 - RNA, 20 nt, Artificial Sequence
  SAMD9L targeting guide sequence portion
cugaaacaaccacugacuuu

SEQ ID NO: 564 - RNA, 20 nt, Artificial Sequence
  SAMD9L targeting guide sequence portion
cuguguauuuccugaaacaa

SEQ ID NO: 565 - RNA, 20 nt, Artificial Sequence
  SAMD9L targeting guide sequence portion
gaaacaaccacugacuuucu

SEQ ID NO: 566 - RNA, 20 nt, Artificial Sequence
  SAMD9L targeting guide sequence portion
gaaagucagugguuguuuca

SEQ ID NO: 567 - RNA, 20 nt, Artificial Sequence
  SAMD9L targeting guide sequence portion
gcaagaaagucagugguugu

SEQ ID NO: 568 - RNA, 20 nt, Artificial Sequence
  SAMD9L targeting guide sequence portion
gguuguuucaggaaauacac

SEQ ID NO: 569 - RNA, 20 nt, Artificial Sequence
  SAMD9L targeting guide sequence portion
guauuuccugaaacaaccac

SEQ ID NO: 570 - RNA, 20 nt, Artificial Sequence
  SAMD9L targeting guide sequence portion
gucagugguuguuucaggaa

SEQ ID NO: 571 - RNA, 20 nt, Artificial Sequence
  SAMD9L targeting guide sequence portion
gugguuguuucaggaaauac

SEQ ID NO: 572 - RNA, 20 nt, Artificial Sequence
  SAMD9L targeting guide sequence portion
guguauuuccugaaacaacc

SEQ ID NO: 573 - RNA, 20 nt, Artificial Sequence
  SAMD9L targeting guide sequence portion
guuaagcaagaaagucagug

SEQ ID NO: 574 - RNA, 20 nt, Artificial Sequence
  SAMD9L targeting guide sequence portion
guucuguguauuuccugaaa

SEQ ID NO: 575 - RNA, 20 nt, Artificial Sequence
  SAMD9L targeting guide sequence portion
uaagcaagaaagucaguggu

SEQ ID NO: 576 - RNA, 20 nt, Artificial Sequence
  SAMD9L targeting guide sequence portion
uauuuccugaaacaaccacu

SEQ ID NO: 577 - RNA, 20 nt, Artificial Sequence
  SAMD9L targeting guide sequence portion
ucagugguuguuucaggaaa

SEQ ID NO: 578 - RNA, 20 nt, Artificial Sequence
  SAMD9L targeting guide sequence portion
ucauguuaagcaagaaaguc

SEQ ID NO: 579 - RNA, 20 nt, Artificial Sequence
  SAMD9L targeting guide sequence portion
uccugaaacaaccacugacu

SEQ ID NO: 580 - RNA, 20 nt, Artificial Sequence
  SAMD9L targeting guide sequence portion
ucuguguauuuccugaaaca

SEQ ID NO: 581 - RNA, 20 nt, Artificial Sequence
  SAMD9L targeting guide sequence portion
ugaaacaaccacugacuuuc

SEQ ID NO: 582 - RNA, 20 nt, Artificial Sequence
  SAMD9L targeting guide sequence portion
ugguuguuucaggaaauaca

SEQ ID NO: 583 - RNA, 20 nt, Artificial Sequence
  SAMD9L targeting guide sequence portion
uguauuuccugaaacaacca

SEQ ID NO: 584 - RNA, 20 nt, Artificial Sequence
  SAMD9L targeting guide sequence portion
uguguauuuccugaaacaac

SEQ ID NO: 585 - RNA, 20 nt, Artificial Sequence
  SAMD9L targeting guide sequence portion
uguuaagcaagaaagucagu

SEQ ID NO: 586 - RNA, 20 nt, Artificial Sequence
  SAMD9L targeting guide sequence portion
uuaagcaagaaagucagugg

SEQ ID NO: 587 - RNA, 20 nt, Artificial Sequence
  SAMD9L targeting guide sequence portion
uuccugaaacaaccacugac

SEQ ID NO: 588 - RNA, 20 nt, Artificial Sequence
  SAMD9L targeting guide sequence portion
uucuguguauuuccugaaac

SEQ ID NO: 589 - RNA, 20 nt, Artificial Sequence
  SAMD9L targeting guide sequence portion
uuuccugaaacaaccacuga

SEQ ID NO: 590 - RNA, 21 nt, Artificial Sequence
  SAMD9L targeting guide sequence portion
aaacaaccacugacuuucuug

SEQ ID NO: 591 - RNA, 21 nt, Artificial Sequence
  SAMD9L targeting guide sequence portion
aaagucagugguuguuucagg

SEQ ID NO: 592 - RNA, 21 nt, Artificial Sequence
  SAMD9L targeting guide sequence portion
aaaucauguuaagcaagaaag

SEQ ID NO: 593 - RNA, 21 nt, Artificial Sequence
  SAMD9L targeting guide sequence portion
aacaaccacugacuuucuugc

SEQ ID NO: 594 - RNA, 21 nt, Artificial Sequence
  SAMD9L targeting guide sequence portion
aaccacugacuuucuugcuua

SEQ ID NO: 595 - RNA, 21 nt, Artificial Sequence
  SAMD9L targeting guide sequence portion
aagaaagucagugguuguuuc

SEQ ID NO: 596 - RNA, 21 nt, Artificial Sequence
  SAMD9L targeting guide sequence portion
aagcaagaaagucagugguug

SEQ ID NO: 597 - RNA, 21 nt, Artificial Sequence
  SAMD9L targeting guide sequence portion
aagucagugguuguuucagga

SEQ ID NO: 598 - RNA, 21 nt, Artificial Sequence
  SAMD9L targeting guide sequence portion
aaguucuguguauuuccugaa

SEQ ID NO: 599 - RNA, 21 nt, Artificial Sequence
  SAMD9L targeting guide sequence portion
aaucauguuaagcaagaaagu

SEQ ID NO: 600 - RNA, 21 nt, Artificial Sequence
  SAMD9L targeting guide sequence portion
acaaccacugacuuucuugcu

SEQ ID NO: 601 - RNA, 21 nt, Artificial Sequence
  SAMD9L targeting guide sequence portion
accacugacuuucuugcuuaa

SEQ ID NO: 602 - RNA, 21 nt, Artificial Sequence
  SAMD9L targeting guide sequence portion
agaaagucagugguuguuuca

SEQ ID NO: 603 - RNA, 21 nt, Artificial Sequence
  SAMD9L targeting guide sequence portion
agcaagaaagucagugguugu

SEQ ID NO: 604 - RNA, 21 nt, Artificial Sequence
  SAMD9L targeting guide sequence portion
agucagugguuguuucaggaa

SEQ ID NO: 605 - RNA, 21 nt, Artificial Sequence
  SAMD9L targeting guide sequence portion
agugguuguuucaggaaauac

SEQ ID NO: 606 - RNA, 21 nt, Artificial Sequence
  SAMD9L targeting guide sequence portion
aguucuguguauuuccugaaa

SEQ ID NO: 607 - RNA, 21 nt, Artificial Sequence
  SAMD9L targeting guide sequence portion
aucauguuaagcaagaaaguc

SEQ ID NO: 608 - RNA, 21 nt, Artificial Sequence
  SAMD9L targeting guide sequence portion
auguuaagcaagaaagucagu

SEQ ID NO: 609 - RNA, 21 nt, Artificial Sequence
  SAMD9L targeting guide sequence portion
auuuccugaaacaaccacuga

SEQ ID NO: 610 - RNA, 21 nt, Artificial Sequence
  SAMD9L targeting guide sequence portion
caaccacugacuuucuugcuu

SEQ ID NO: 611 - RNA, 21 nt, Artificial Sequence
  SAMD9L targeting guide sequence portion
caagaaagucagugguuguuu

SEQ ID NO: 612 - RNA, 21 nt, Artificial Sequence
  SAMD9L targeting guide sequence portion
cacugacuuucuugcuuaaca

SEQ ID NO: 613 - RNA, 21 nt, Artificial Sequence
  SAMD9L targeting guide sequence portion
cagugguuguuucaggaaaua

SEQ ID NO: 614 - RNA, 21 nt, Artificial Sequence
  SAMD9L targeting guide sequence portion
cauguuaagcaagaaagucag

SEQ ID NO: 615 - RNA, 21 nt, Artificial Sequence
  SAMD9L targeting guide sequence portion
ccacugacuuucuugcuuaac

SEQ ID NO: 616 - RNA, 21 nt, Artificial Sequence
  SAMD9L targeting guide sequence portion
ccugaaacaaccacugacuuu

SEQ ID NO: 617 - RNA, 21 nt, Artificial Sequence
  SAMD9L targeting guide sequence portion
cugaaacaaccacugacuuuc

SEQ ID NO: 618 - RNA, 21 nt, Artificial Sequence
  SAMD9L targeting guide sequence portion
cuguguauuuccugaaacaac

SEQ ID NO: 619 - RNA, 21 nt, Artificial Sequence
  SAMD9L targeting guide sequence portion
gaaacaaccacugacuuucuu

SEQ ID NO: 620 - RNA, 21 nt, Artificial Sequence
  SAMD9L targeting guide sequence portion
gaaagucagugguuguuucag

SEQ ID NO: 621 - RNA, 21 nt, Artificial Sequence
  SAMD9L targeting guide sequence portion
gcaagaaagucagugguuguu

SEQ ID NO: 622 - RNA, 21 nt, Artificial Sequence
  SAMD9L targeting guide sequence portion
gguuguuucaggaaauacaca

SEQ ID NO: 623 - RNA, 21 nt, Artificial Sequence
  SAMD9L targeting guide sequence portion
guauuuccugaaacaaccacu

SEQ ID NO: 624 - RNA, 21 nt, Artificial Sequence
  SAMD9L targeting guide sequence portion
gucagugguuguuucaggaaa

SEQ ID NO: 625 - RNA, 21 nt, Artificial Sequence
  SAMD9L targeting guide sequence portion
gugguuguuucaggaaauaca

SEQ ID NO: 626 - RNA, 21 nt, Artificial Sequence
  SAMD9L targeting guide sequence portion
guguauuuccugaaacaacca

SEQ ID NO: 627 - RNA, 21 nt, Artificial Sequence
  SAMD9L targeting guide sequence portion
guuaagcaagaaagucagugg

SEQ ID NO: 628 - RNA, 21 nt, Artificial Sequence
  SAMD9L targeting guide sequence portion
guucuguguauuuccugaaac

SEQ ID NO: 629 - RNA, 21 nt, Artificial Sequence
  SAMD9L targeting guide sequence portion
uaagcaagaaagucagugguu

SEQ ID NO: 630 - RNA, 21 nt, Artificial Sequence
  SAMD9L targeting guide sequence portion
uauuuccugaaacaaccacug

SEQ ID NO: 631 - RNA, 21 nt, Artificial Sequence
  SAMD9L targeting guide sequence portion
ucagugguuguuucaggaaau

SEQ ID NO: 632 - RNA, 21 nt, Artificial Sequence
  SAMD9L targeting guide sequence portion
ucauguuaagcaagaaaguca

SEQ ID NO: 633 - RNA, 21 nt, Artificial Sequence
  SAMD9L targeting guide sequence portion
uccugaaacaaccacugacuu

SEQ ID NO: 634 - RNA, 21 nt, Artificial Sequence
  SAMD9L targeting guide sequence portion
ucuguguauuuccugaaacaa

SEQ ID NO: 635 - RNA, 21 nt, Artificial Sequence
  SAMD9L targeting guide sequence portion
ugaaacaaccacugacuuucu

SEQ ID NO: 636 - RNA, 21 nt, Artificial Sequence
  SAMD9L targeting guide sequence portion
ugguuguuucaggaaauacac

SEQ ID NO: 637 - RNA, 21 nt, Artificial Sequence
  SAMD9L targeting guide sequence portion
uguauuuccugaaacaaccac

SEQ ID NO: 638 - RNA, 21 nt, Artificial Sequence
  SAMD9L targeting guide sequence portion
uguguauuuccugaaacaacc

SEQ ID NO: 639 - RNA, 21 nt, Artificial Sequence
  SAMD9L targeting guide sequence portion
uguuaagcaagaaagucagug

SEQ ID NO: 640 - RNA, 21 nt, Artificial Sequence
  SAMD9L targeting guide sequence portion
uuaagcaagaaagucaguggu

SEQ ID NO: 641 - RNA, 21 nt, Artificial Sequence
  SAMD9L targeting guide sequence portion
uuccugaaacaaccacugacu

SEQ ID NO: 642 - RNA, 21 nt, Artificial Sequence
  SAMD9L targeting guide sequence portion
uucuguguauuuccugaaaca

SEQ ID NO: 643 - RNA, 21 nt, Artificial Sequence
  SAMD9L targeting guide sequence portion
uuuccugaaacaaccacugac

SEQ ID NO: 644 - RNA, 22 nt, Artificial Sequence
  SAMD9L targeting guide sequence portion
aaacaaccacugacuuucuugc

SEQ ID NO: 645 - RNA, 22 nt, Artificial Sequence
  SAMD9L targeting guide sequence portion
aaagucagugguuguuucagga

SEQ ID NO: 646 - RNA, 22 nt, Artificial Sequence
  SAMD9L targeting guide sequence portion
aaaguucuguguauuuccugaa

SEQ ID NO: 647 - RNA, 22 nt, Artificial Sequence
  SAMD9L targeting guide sequence portion
aaaucauguuaagcaagaaagu

SEQ ID NO: 648 - RNA, 22 nt, Artificial Sequence
  SAMD9L targeting guide sequence portion
aacaaccacugacuuucuugcu

SEQ ID NO: 649 - RNA, 22 nt, Artificial Sequence
  SAMD9L targeting guide sequence portion
aaccacugacuuucuugcuuaa

SEQ ID NO: 650 - RNA, 22 nt, Artificial Sequence
  SAMD9L targeting guide sequence portion
aagaaagucagugguuguuuca

SEQ ID NO: 651 - RNA, 22 nt, Artificial Sequence
  SAMD9L targeting guide sequence portion
aagcaagaaagucagugguugu

SEQ ID NO: 652 - RNA, 22 nt, Artificial Sequence
  SAMD9L targeting guide sequence portion
aagucagugguuguuucaggaa

SEQ ID NO: 653 - RNA, 22 nt, Artificial Sequence
  SAMD9L targeting guide sequence portion
aaguucuguguauuuccugaaa

SEQ ID NO: 654 - RNA, 22 nt, Artificial Sequence
  SAMD9L targeting guide sequence portion
aaucauguuaagcaagaaaguc

SEQ ID NO: 655 - RNA, 22 nt, Artificial Sequence
  SAMD9L targeting guide sequence portion
acaaccacugacuuucuugcuu

SEQ ID NO: 656 - RNA, 22 nt, Artificial Sequence
  SAMD9L targeting guide sequence portion
accacugacuuucuugcuuaac

SEQ ID NO: 657 - RNA, 22 nt, Artificial Sequence
  SAMD9L targeting guide sequence portion
agaaagucagugguuguuucag

SEQ ID NO: 658 - RNA, 22 nt, Artificial Sequence
  SAMD9L targeting guide sequence portion
agcaagaaagucagugguuguu

SEQ ID NO: 659 - RNA, 22 nt, Artificial Sequence
  SAMD9L targeting guide sequence portion
agucagugguuguuucaggaaa

SEQ ID NO: 660 - RNA, 22 nt, Artificial Sequence
  SAMD9L targeting guide sequence portion
agugguuguuucaggaaauaca

SEQ ID NO: 661 - RNA, 22 nt, Artificial Sequence
  SAMD9L targeting guide sequence portion
aguucuguguauuuccugaaac

SEQ ID NO: 662 - RNA, 22 nt, Artificial Sequence
  SAMD9L targeting guide sequence portion
aucauguuaagcaagaaaguca

SEQ ID NO: 663 - RNA, 22 nt, Artificial Sequence
  SAMD9L targeting guide sequence portion
auguuaagcaagaaagucagug

SEQ ID NO: 664 - RNA, 22 nt, Artificial Sequence
  SAMD9L targeting guide sequence portion
auuuccugaaacaaccacugac

SEQ ID NO: 665 - RNA, 22 nt, Artificial Sequence
  SAMD9L targeting guide sequence portion
caaccacugacuuucuugcuua

SEQ ID NO: 666 - RNA, 22 nt, Artificial Sequence
  SAMD9L targeting guide sequence portion
caagaaagucagugguuguuuc

SEQ ID NO: 667 - RNA, 22 nt, Artificial Sequence
  SAMD9L targeting guide sequence portion
cacugacuuucuugcuuaacau

SEQ ID NO: 668 - RNA, 22 nt, Artificial Sequence
  SAMD9L targeting guide sequence portion
cagugguuguuucaggaaauac

SEQ ID NO: 669 - RNA, 22 nt, Artificial Sequence
  SAMD9L targeting guide sequence portion
cauguuaagcaagaaagucagu

SEQ ID NO: 670 - RNA, 22 nt, Artificial Sequence
  SAMD9L targeting guide sequence portion
ccacugacuuucuugcuuaaca

SEQ ID NO: 671 - RNA, 22 nt, Artificial Sequence
  SAMD9L targeting guide sequence portion
ccugaaacaaccacugacuuuc

SEQ ID NO: 672 - RNA, 22 nt, Artificial Sequence
  SAMD9L targeting guide sequence portion
cugaaacaaccacugacuuucu

SEQ ID NO: 673 - RNA, 22 nt, Artificial Sequence
  SAMD9L targeting guide sequence portion
cuguguauuuccugaaacaacc

SEQ ID NO: 674 - RNA, 22 nt, Artificial Sequence
  SAMD9L targeting guide sequence portion
gaaacaaccacugacuuucuug

SEQ ID NO: 675 - RNA, 22 nt, Artificial Sequence
  SAMD9L targeting guide sequence portion
gaaagucagugguuguuucagg

SEQ ID NO: 676 - RNA, 22 nt, Artificial Sequence
  SAMD9L targeting guide sequence portion
gaaaucauguuaagcaagaaag

SEQ ID NO: 677 - RNA, 22 nt, Artificial Sequence
  SAMD9L targeting guide sequence portion
gcaagaaagucagugguuguuu

SEQ ID NO: 678 - RNA, 22 nt, Artificial Sequence
  SAMD9L targeting guide sequence portion
gguuguuucaggaaauacacag

SEQ ID NO: 679 - RNA, 22 nt, Artificial Sequence
  SAMD9L targeting guide sequence portion
guauuuccugaaacaaccacug

SEQ ID NO: 680 - RNA, 22 nt, Artificial Sequence
  SAMD9L targeting guide sequence portion
gucagugguuguuucaggaaau

SEQ ID NO: 681 - RNA, 22 nt, Artificial Sequence
  SAMD9L targeting guide sequence portion
gugguuguuucaggaaauacac

SEQ ID NO: 682 - RNA, 22 nt, Artificial Sequence
  SAMD9L targeting guide sequence portion
guguauuuccugaaacaaccac

SEQ ID NO: 683 - RNA, 22 nt, Artificial Sequence
  SAMD9L targeting guide sequence portion
guuaagcaagaaagucaguggu

SEQ ID NO: 684 - RNA, 22 nt, Artificial Sequence
  SAMD9L targeting guide sequence portion
guucuguguauuuccugaaaca

SEQ ID NO: 685 - RNA, 22 nt, Artificial Sequence
  SAMD9L targeting guide sequence portion
uaagcaagaaagucagugguug

SEQ ID NO: 686 - RNA, 22 nt, Artificial Sequence
  SAMD9L targeting guide sequence portion
uauuuccugaaacaaccacuga

SEQ ID NO: 687 - RNA, 22 nt, Artificial Sequence
  SAMD9L targeting guide sequence portion
ucagugguuguuucaggaaaua

SEQ ID NO: 688 - RNA, 22 nt, Artificial Sequence
  SAMD9L targeting guide sequence portion
ucauguuaagcaagaaagucag

SEQ ID NO: 689 - RNA, 22 nt, Artificial Sequence
  SAMD9L targeting guide sequence portion
uccugaaacaaccacugacuuu

SEQ ID NO: 690 - RNA, 22 nt, Artificial Sequence
  SAMD9L targeting guide sequence portion
ucuguguauuuccugaaacaac

SEQ ID NO: 691 - RNA, 22 nt, Artificial Sequence
  SAMD9L targeting guide sequence portion
ugaaacaaccacugacuuucuu

SEQ ID NO: 692 - RNA, 22 nt, Artificial Sequence
  SAMD9L targeting guide sequence portion
ugguuguuucaggaaauacaca

SEQ ID NO: 693 - RNA, 22 nt, Artificial Sequence
  SAMD9L targeting guide sequence portion
uguauuuccugaaacaaccacu

SEQ ID NO: 694 - RNA, 22 nt, Artificial Sequence
  SAMD9L targeting guide sequence portion
uguguauuuccugaaacaacca

SEQ ID NO: 695 - RNA, 22 nt, Artificial Sequence
  SAMD9L targeting guide sequence portion
uguuaagcaagaaagucagugg

SEQ ID NO: 696 - RNA, 22 nt, Artificial Sequence
  SAMD9L targeting guide sequence portion
uuaagcaagaaagucagugguu

SEQ ID NO: 697 - RNA, 22 nt, Artificial Sequence
  SAMD9L targeting guide sequence portion
uuccugaaacaaccacugacuu

SEQ ID NO: 698 - RNA, 22 nt, Artificial Sequence
  SAMD9L targeting guide sequence portion
uucuguguauuuccugaaacaa

SEQ ID NO: 699 - RNA, 22 nt, Artificial Sequence
  SAMD9L targeting guide sequence portion
uuuccugaaacaaccacugacu

SEQ ID NO: 700 - RNA, 20 nt, Artificial Sequence
  SAMD9L targeting guide sequence portion
aaaaugaaguauacccaaaa

SEQ ID NO: 701 - RNA, 20 nt, Artificial Sequence
  SAMD9L targeting guide sequence portion
aaaugaaguauacccaaaaa

SEQ ID NO: 702 - RNA, 20 nt, Artificial Sequence
  SAMD9L targeting guide sequence portion
aaguauacccaaaaagaaau

SEQ ID NO: 703 - RNA, 20 nt, Artificial Sequence
  SAMD9L targeting guide sequence portion
aaugaaguauacccaaaaag

SEQ ID NO: 704 - RNA, 20 nt, Artificial Sequence
  SAMD9L targeting guide sequence portion
aauuucuuuuuggguauacu

SEQ ID NO: 705 - RNA, 20 nt, Artificial Sequence
  SAMD9L targeting guide sequence portion
acuucauuuucagaagaacc

SEQ ID NO: 706 - RNA, 20 nt, Artificial Sequence
  SAMD9L targeting guide sequence portion
aguauacccaaaaagaaauu

SEQ ID NO: 707 - RNA, 20 nt, Artificial Sequence
  SAMD9L targeting guide sequence portion
auacuucauuuucagaagaa

SEQ ID NO: 708 - RNA, 20 nt, Artificial Sequence
  SAMD9L targeting guide sequence portion
auaugguucuucugaaaaug

SEQ ID NO: 709 - RNA, 20 nt, Artificial Sequence
  SAMD9L targeting guide sequence portion
augaaguauacccaaaaaga

SEQ ID NO: 710 - RNA, 20 nt, Artificial Sequence
  SAMD9L targeting guide sequence portion
augguucuucugaaaaugaa

SEQ ID NO: 711 - RNA, 20 nt, Artificial Sequence
  SAMD9L targeting guide sequence portion
auuauaugguucuucugaaa

SEQ ID NO: 712 - RNA, 20 nt, Artificial Sequence
  SAMD9L targeting guide sequence portion
auuucuuuuuggguauacuu

SEQ ID NO: 713 - RNA, 20 nt, Artificial Sequence
  SAMD9L targeting guide sequence portion
caauuucuuuuuggguauac

SEQ ID NO: 714 - RNA, 20 nt, Artificial Sequence
  SAMD9L targeting guide sequence portion
cugaaaaugaaguauaccca

SEQ ID NO: 715 - RNA, 20 nt, Artificial Sequence
  SAMD9L targeting guide sequence portion
cugcaauuucuuuuugggua

SEQ ID NO: 716 - RNA, 20 nt, Artificial Sequence
  SAMD9L targeting guide sequence portion
cuucauuuucagaagaacca

SEQ ID NO: 717 - RNA, 20 nt, Artificial Sequence
  SAMD9L targeting guide sequence portion
cuucugaaaaugaaguauac

SEQ ID NO: 718 - RNA, 20 nt, Artificial Sequence
  SAMD9L targeting guide sequence portion
cuuuuuggguauacuucauu

SEQ ID NO: 719 - RNA, 20 nt, Artificial Sequence
  SAMD9L targeting guide sequence portion
gaaaaugaaguauacccaaa

SEQ ID NO: 720 - RNA, 20 nt, Artificial Sequence
  SAMD9L targeting guide sequence portion
gaaguauacccaaaaagaaa

SEQ ID NO: 721 - RNA, 20 nt, Artificial Sequence
  SAMD9L targeting guide sequence portion
gauuauaugguucuucugaa

SEQ ID NO: 722 - RNA, 20 nt, Artificial Sequence
  SAMD9L targeting guide sequence portion
gcaauuucuuuuuggguaua

SEQ ID NO: 723 - RNA, 20 nt, Artificial Sequence
  SAMD9L targeting guide sequence portion
ggguauacuucauuuucaga

SEQ ID NO: 724 - RNA, 20 nt, Artificial Sequence
  SAMD9L targeting guide sequence portion
gguauacuucauuuucagaa

SEQ ID NO: 725 - RNA, 20 nt, Artificial Sequence
  SAMD9L targeting guide sequence portion
gguucuucugaaaaugaagu

SEQ ID NO: 726 - RNA, 20 nt, Artificial Sequence
  SAMD9L targeting guide sequence portion
guauacuucauuuucagaag

SEQ ID NO: 727 - RNA, 20 nt, Artificial Sequence
  SAMD9L targeting guide sequence portion
guucuucugaaaaugaagua

SEQ ID NO: 728 - RNA, 20 nt, Artificial Sequence
  SAMD9L targeting guide sequence portion
uacuucauuuucagaagaac

SEQ ID NO: 729 - RNA, 20 nt, Artificial Sequence
  SAMD9L targeting guide sequence portion
uauacuucauuuucagaaga

SEQ ID NO: 730 - RNA, 20 nt, Artificial Sequence
  SAMD9L targeting guide sequence portion
uauaugguucuucugaaaau

SEQ ID NO: 731 - RNA, 20 nt, Artificial Sequence
  SAMD9L targeting guide sequence portion
uaugguucuucugaaaauga

SEQ ID NO: 732 - RNA, 20 nt, Artificial Sequence
  SAMD9L targeting guide sequence portion
ucugaaaaugaaguauaccc

SEQ ID NO: 733 - RNA, 20 nt, Artificial Sequence
  SAMD9L targeting guide sequence portion
ucugcaauuucuuuuugggu

SEQ ID NO: 734 - RNA, 20 nt, Artificial Sequence
  SAMD9L targeting guide sequence portion
ucuucugaaaaugaaguaua

SEQ ID NO: 735 - RNA, 20 nt, Artificial Sequence
  SAMD9L targeting guide sequence portion
ucuuuuuggguauacuucau

SEQ ID NO: 736 - RNA, 20 nt, Artificial Sequence
  SAMD9L targeting guide sequence portion
ugaaaaugaaguauacccaa

SEQ ID NO: 737 - RNA, 20 nt, Artificial Sequence
  SAMD9L targeting guide sequence portion
ugaaguauacccaaaaagaa

SEQ ID NO: 738 - RNA, 20 nt, Artificial Sequence
  SAMD9L targeting guide sequence portion
ugcaauuucuuuuuggguau

SEQ ID NO: 739 - RNA, 20 nt, Artificial Sequence
  SAMD9L targeting guide sequence portion
uggguauacuucauuuucag

SEQ ID NO: 740 - RNA, 20 nt, Artificial Sequence
  SAMD9L targeting guide sequence portion
ugguucuucugaaaaugaag

SEQ ID NO: 741 - RNA, 20 nt, Artificial Sequence
  SAMD9L targeting guide sequence portion
uuauaugguucuucugaaaa

SEQ ID NO: 742 - RNA, 20 nt, Artificial Sequence
  SAMD9L targeting guide sequence portion
uucauuuucagaagaaccau

SEQ ID NO: 743 - RNA, 20 nt, Artificial Sequence
  SAMD9L targeting guide sequence portion
uucugaaaaugaaguauacc

SEQ ID NO: 744 - RNA, 20 nt, Artificial Sequence
  SAMD9L targeting guide sequence portion
uucugcaauuucuuuuuggg

SEQ ID NO: 745 - RNA, 20 nt, Artificial Sequence
  SAMD9L targeting guide sequence portion
uucuucugaaaaugaaguau

SEQ ID NO: 746 - RNA, 20 nt, Artificial Sequence
  SAMD9L targeting guide sequence portion
uucuuuuuggguauacuuca

SEQ ID NO: 747 - RNA, 20 nt, Artificial Sequence
  SAMD9L targeting guide sequence portion
uuggguauacuucauuuuca

SEQ ID NO: 748 - RNA, 20 nt, Artificial Sequence
  SAMD9L targeting guide sequence portion
uuucuuuuuggguauacuuc

SEQ ID NO: 749 - RNA, 20 nt, Artificial Sequence
  SAMD9L targeting guide sequence portion
uuuggguauacuucauuuuc

SEQ ID NO: 750 - RNA, 20 nt, Artificial Sequence
  SAMD9L targeting guide sequence portion
uuuuggguauacuucauuuu

SEQ ID NO: 751 - RNA, 20 nt, Artificial Sequence
  SAMD9L targeting guide sequence portion
uuuuuggguauacuucauuu

SEQ ID NO: 752 - RNA, 21 nt, Artificial Sequence
  SAMD9L targeting guide sequence portion
aaaaugaaguauacccaaaaa

SEQ ID NO: 753 - RNA, 21 nt, Artificial Sequence
  SAMD9L targeting guide sequence portion
aaaugaaguauacccaaaaag

SEQ ID NO: 754 - RNA, 21 nt, Artificial Sequence
  SAMD9L targeting guide sequence portion
aaguauacccaaaaagaaauu

SEQ ID NO: 755 - RNA, 21 nt, Artificial Sequence
  SAMD9L targeting guide sequence portion
aaugaaguauacccaaaaaga

SEQ ID NO: 756 - RNA, 21 nt, Artificial Sequence
  SAMD9L targeting guide sequence portion
aauuucuuuuuggguauacuu

SEQ ID NO: 757 - RNA, 21 nt, Artificial Sequence
  SAMD9L targeting guide sequence portion
acuucauuuucagaagaacca

SEQ ID NO: 758 - RNA, 21 nt, Artificial Sequence
  SAMD9L targeting guide sequence portion
aguauacccaaaaagaaauug

SEQ ID NO: 759 - RNA, 21 nt, Artificial Sequence
  SAMD9L targeting guide sequence portion
auacuucauuuucagaagaac

SEQ ID NO: 760 - RNA, 21 nt, Artificial Sequence
  SAMD9L targeting guide sequence portion
auaugguucuucugaaaauga

SEQ ID NO: 761 - RNA, 21 nt, Artificial Sequence
  SAMD9L targeting guide sequence portion
augaaguauacccaaaaagaa

SEQ ID NO: 762 - RNA, 21 nt, Artificial Sequence
  SAMD9L targeting guide sequence portion
augguucuucugaaaaugaag

SEQ ID NO: 763 - RNA, 21 nt, Artificial Sequence
  SAMD9L targeting guide sequence portion
auuauaugguucuucugaaaa

SEQ ID NO: 764 - RNA, 21 nt, Artificial Sequence
  SAMD9L targeting guide sequence portion
auuucuuuuuggguauacuuc

SEQ ID NO: 765 - RNA, 21 nt, Artificial Sequence
  SAMD9L targeting guide sequence portion
caauuucuuuuuggguauacu

SEQ ID NO: 766 - RNA, 21 nt, Artificial Sequence
  SAMD9L targeting guide sequence portion
cugaaaaugaaguauacccaa

SEQ ID NO: 767 - RNA, 21 nt, Artificial Sequence
  SAMD9L targeting guide sequence portion
cugcaauuucuuuuuggguau

SEQ ID NO: 768 - RNA, 21 nt, Artificial Sequence
  SAMD9L targeting guide sequence portion
cuucauuuucagaagaaccau

SEQ ID NO: 769 - RNA, 21 nt, Artificial Sequence
  SAMD9L targeting guide sequence portion
cuucugaaaaugaaguauacc

SEQ ID NO: 770 - RNA, 21 nt, Artificial Sequence
  SAMD9L targeting guide sequence portion
cuuuuuggguauacuucauuu

SEQ ID NO: 771 - RNA, 21 nt, Artificial Sequence
  SAMD9L targeting guide sequence portion
gaaaaugaaguauacccaaaa

SEQ ID NO: 772 - RNA, 21 nt, Artificial Sequence
  SAMD9L targeting guide sequence portion
gaaguauacccaaaaagaaau

SEQ ID NO: 773 - RNA, 21 nt, Artificial Sequence
  SAMD9L targeting guide sequence portion
gauuauaugguucuucugaaa

SEQ ID NO: 774 - RNA, 21 nt, Artificial Sequence
  SAMD9L targeting guide sequence portion
gcaauuucuuuuuggguauac

SEQ ID NO: 775 - RNA, 21 nt, Artificial Sequence
  SAMD9L targeting guide sequence portion
ggguauacuucauuuucagaa

SEQ ID NO: 776 - RNA, 21 nt, Artificial Sequence
  SAMD9L targeting guide sequence portion
gguauacuucauuuucagaag

SEQ ID NO: 777 - RNA, 21 nt, Artificial Sequence
  SAMD9L targeting guide sequence portion
gguucuucugaaaaugaagua

SEQ ID NO: 778 - RNA, 21 nt, Artificial Sequence
  SAMD9L targeting guide sequence portion
guauacuucauuuucagaaga

SEQ ID NO: 779 - RNA, 21 nt, Artificial Sequence
  SAMD9L targeting guide sequence portion
guucuucugaaaaugaaguau

SEQ ID NO: 780 - RNA, 21 nt, Artificial Sequence
  SAMD9L targeting guide sequence portion
uacuucauuuucagaagaacc

SEQ ID NO: 781 - RNA, 21 nt, Artificial Sequence
  SAMD9L targeting guide sequence portion
uauacuucauuuucagaagaa

SEQ ID NO: 782 - RNA, 21 nt, Artificial Sequence
  SAMD9L targeting guide sequence portion
uauaugguucuucugaaaaug

SEQ ID NO: 783 - RNA, 21 nt, Artificial Sequence
  SAMD9L targeting guide sequence portion
uaugguucuucugaaaaugaa

SEQ ID NO: 784 - RNA, 21 nt, Artificial Sequence
  SAMD9L targeting guide sequence portion
ucugaaaaugaaguauaccca

SEQ ID NO: 785 - RNA, 21 nt, Artificial Sequence
  SAMD9L targeting guide sequence portion
ucugcaauuucuuuuugggua

SEQ ID NO: 786 - RNA, 21 nt, Artificial Sequence
  SAMD9L targeting guide sequence portion
ucuucugaaaaugaaguauac

SEQ ID NO: 787 - RNA, 21 nt, Artificial Sequence
  SAMD9L targeting guide sequence portion
ucuuuuuggguauacuucauu

SEQ ID NO: 788 - RNA, 21 nt, Artificial Sequence
  SAMD9L targeting guide sequence portion
ugaaaaugaaguauacccaaa

SEQ ID NO: 789 - RNA, 21 nt, Artificial Sequence
  SAMD9L targeting guide sequence portion
ugaaguauacccaaaaagaaa

SEQ ID NO: 790 - RNA, 21 nt, Artificial Sequence
  SAMD9L targeting guide sequence portion
ugauuauaugguucuucugaa

SEQ ID NO: 791 - RNA, 21 nt, Artificial Sequence
  SAMD9L targeting guide sequence portion
ugcaauuucuuuuuggguaua

SEQ ID NO: 792 - RNA, 21 nt, Artificial Sequence
  SAMD9L targeting guide sequence portion
uggguauacuucauuuucaga

SEQ ID NO: 793 - RNA, 21 nt, Artificial Sequence
  SAMD9L targeting guide sequence portion
ugguucuucugaaaaugaagu

SEQ ID NO: 794 - RNA, 21 nt, Artificial Sequence
  SAMD9L targeting guide sequence portion
uuauaugguucuucugaaaau

SEQ ID NO: 795 - RNA, 21 nt, Artificial Sequence
  SAMD9L targeting guide sequence portion
uucauuuucagaagaaccaua

SEQ ID NO: 796 - RNA, 21 nt, Artificial Sequence
  SAMD9L targeting guide sequence portion
uucugaaaaugaaguauaccc

SEQ ID NO: 797 - RNA, 21 nt, Artificial Sequence
  SAMD9L targeting guide sequence portion
uucugcaauuucuuuuugggu

SEQ ID NO: 798 - RNA, 21 nt, Artificial Sequence
  SAMD9L targeting guide sequence portion
uucuucugaaaaugaaguaua

SEQ ID NO: 799 - RNA, 21 nt, Artificial Sequence
  SAMD9L targeting guide sequence portion
uucuuuuuggguauacuucau

SEQ ID NO: 800 - RNA, 21 nt, Artificial Sequence
  SAMD9L targeting guide sequence portion
uuggguauacuucauuuucag

SEQ ID NO: 801 - RNA, 21 nt, Artificial Sequence
  SAMD9L targeting guide sequence portion
uuucugcaauuucuuuuuggg

SEQ ID NO: 802 - RNA, 21 nt, Artificial Sequence
  SAMD9L targeting guide sequence portion
uuucuuuuuggguauacuuca

SEQ ID NO: 803 - RNA, 21 nt, Artificial Sequence
  SAMD9L targeting guide sequence portion
uuuggguauacuucauuuuca

SEQ ID NO: 804 - RNA, 21 nt, Artificial Sequence
  SAMD9L targeting guide sequence portion
uuuuggguauacuucauuuuc

SEQ ID NO: 805 - RNA, 21 nt, Artificial Sequence
  SAMD9L targeting guide sequence portion
uuuuuggguauacuucauuuu

SEQ ID NO: 806 - RNA, 22 nt, Artificial Sequence
  SAMD9L targeting guide sequence portion
aaaaugaaguauacccaaaaag

SEQ ID NO: 807 - RNA, 22 nt, Artificial Sequence
  SAMD9L targeting guide sequence portion
aaaugaaguauacccaaaaaga

SEQ ID NO: 808 - RNA, 22 nt, Artificial Sequence
  SAMD9L targeting guide sequence portion
aaguauacccaaaaagaaauug

SEQ ID NO: 809 - RNA, 22 nt, Artificial Sequence
  SAMD9L targeting guide sequence portion
aaugaaguauacccaaaaagaa

SEQ ID NO: 810 - RNA, 22 nt, Artificial Sequence
  SAMD9L targeting guide sequence portion
aauuucuuuuuggguauacuuc

SEQ ID NO: 811 - RNA, 22 nt, Artificial Sequence
  SAMD9L targeting guide sequence portion
acuucauuuucagaagaaccau

SEQ ID NO: 812 - RNA, 22 nt, Artificial Sequence
  SAMD9L targeting guide sequence portion
aguauacccaaaaagaaauugc

SEQ ID NO: 813 - RNA, 22 nt, Artificial Sequence
  SAMD9L targeting guide sequence portion
auacuucauuuucagaagaacc

SEQ ID NO: 814 - RNA, 22 nt, Artificial Sequence
  SAMD9L targeting guide sequence portion
auaugguucuucugaaaaugaa

SEQ ID NO: 815 - RNA, 22 nt, Artificial Sequence
  SAMD9L targeting guide sequence portion
augaaguauacccaaaaagaaa

SEQ ID NO: 816 - RNA, 22 nt, Artificial Sequence
  SAMD9L targeting guide sequence portion
augguucuucugaaaaugaagu

SEQ ID NO: 817 - RNA, 22 nt, Artificial Sequence
  SAMD9L targeting guide sequence portion
auuauaugguucuucugaaaau

SEQ ID NO: 818 - RNA, 22 nt, Artificial Sequence
  SAMD9L targeting guide sequence portion
auuucugcaauuucuuuuuggg

SEQ ID NO: 819 - RNA, 22 nt, Artificial Sequence
  SAMD9L targeting guide sequence portion
auuucuuuuuggguauacuuca

SEQ ID NO: 820 - RNA, 22 nt, Artificial Sequence
  SAMD9L targeting guide sequence portion
caauuucuuuuuggguauacuu

SEQ ID NO: 821 - RNA, 22 nt, Artificial Sequence
  SAMD9L targeting guide sequence portion
cugaaaaugaaguauacccaaa

SEQ ID NO: 822 - RNA, 22 nt, Artificial Sequence
  SAMD9L targeting guide sequence portion
cugcaauuucuuuuuggguaua

SEQ ID NO: 823 - RNA, 22 nt, Artificial Sequence
  SAMD9L targeting guide sequence portion
cuucauuuucagaagaaccaua

SEQ ID NO: 824 - RNA, 22 nt, Artificial Sequence
  SAMD9L targeting guide sequence portion
cuucugaaaaugaaguauaccc

SEQ ID NO: 825 - RNA, 22 nt, Artificial Sequence
  SAMD9L targeting guide sequence portion
cuuuuuggguauacuucauuuu

SEQ ID NO: 826 - RNA, 22 nt, Artificial Sequence
  SAMD9L targeting guide sequence portion
gaaaaugaaguauacccaaaaa

SEQ ID NO: 827 - RNA, 22 nt, Artificial Sequence
  SAMD9L targeting guide sequence portion
gaaguauacccaaaaagaaauu

SEQ ID NO: 828 - RNA, 22 nt, Artificial Sequence
  SAMD9L targeting guide sequence portion
gauuauaugguucuucugaaaa

SEQ ID NO: 829 - RNA, 22 nt, Artificial Sequence
  SAMD9L targeting guide sequence portion
gcaauuucuuuuuggguauacu

SEQ ID NO: 830 - RNA, 22 nt, Artificial Sequence
  SAMD9L targeting guide sequence portion
ggguauacuucauuuucagaag

SEQ ID NO: 831 - RNA, 22 nt, Artificial Sequence
  SAMD9L targeting guide sequence portion
gguauacuucauuuucagaaga

SEQ ID NO: 832 - RNA, 22 nt, Artificial Sequence
  SAMD9L targeting guide sequence portion
gguucuucugaaaaugaaguau

SEQ ID NO: 833 - RNA, 22 nt, Artificial Sequence
  SAMD9L targeting guide sequence portion
guauacuucauuuucagaagaa

SEQ ID NO: 834 - RNA, 22 nt, Artificial Sequence
  SAMD9L targeting guide sequence portion
guucuucugaaaaugaaguaua

SEQ ID NO: 835 - RNA, 22 nt, Artificial Sequence
  SAMD9L targeting guide sequence portion
uacuucauuuucagaagaacca

SEQ ID NO: 836 - RNA, 22 nt, Artificial Sequence
  SAMD9L targeting guide sequence portion
uauacuucauuuucagaagaac

SEQ ID NO: 837 - RNA, 22 nt, Artificial Sequence
  SAMD9L targeting guide sequence portion
uauaugguucuucugaaaauga

SEQ ID NO: 838 - RNA, 22 nt, Artificial Sequence
  SAMD9L targeting guide sequence portion
uaugguucuucugaaaaugaag

SEQ ID NO: 839 - RNA, 22 nt, Artificial Sequence
  SAMD9L targeting guide sequence portion
ucugaaaaugaaguauacccaa

SEQ ID NO: 840 - RNA, 22 nt, Artificial Sequence
  SAMD9L targeting guide sequence portion
ucugcaauuucuuuuuggguau

SEQ ID NO: 841 - RNA, 22 nt, Artificial Sequence
  SAMD9L targeting guide sequence portion
ucuucugaaaaugaaguauacc

SEQ ID NO: 842 - RNA, 22 nt, Artificial Sequence
  SAMD9L targeting guide sequence portion
ucuuuuuggguauacuucauuu

SEQ ID NO: 843 - RNA, 22 nt, Artificial Sequence
  SAMD9L targeting guide sequence portion
ugaaaaugaaguauacccaaaa

SEQ ID NO: 844 - RNA, 22 nt, Artificial Sequence
  SAMD9L targeting guide sequence portion
ugaaguauacccaaaaagaaau

SEQ ID NO: 845 - RNA, 22 nt, Artificial Sequence
  SAMD9L targeting guide sequence portion
ugauuauaugguucuucugaaa

SEQ ID NO: 846 - RNA, 22 nt, Artificial Sequence
  SAMD9L targeting guide sequence portion
ugcaauuucuuuuuggguauac

SEQ ID NO: 847 - RNA, 22 nt, Artificial Sequence
  SAMD9L targeting guide sequence portion
uggguauacuucauuuucagaa

SEQ ID NO: 848 - RNA, 22 nt, Artificial Sequence
  SAMD9L targeting guide sequence portion
ugguucuucugaaaaugaagua

SEQ ID NO: 849 - RNA, 22 nt, Artificial Sequence
  SAMD9L targeting guide sequence portion
uuauaugguucuucugaaaaug

SEQ ID NO: 850 - RNA, 22 nt, Artificial Sequence
  SAMD9L targeting guide sequence portion
uucauuuucagaagaaccauau

SEQ ID NO: 851 - RNA, 22 nt, Artificial Sequence
  SAMD9L targeting guide sequence portion
uucugaaaaugaaguauaccca

SEQ ID NO: 852 - RNA, 22 nt, Artificial Sequence
  SAMD9L targeting guide sequence portion
uucugcaauuucuuuuugggua

SEQ ID NO: 853 - RNA, 22 nt, Artificial Sequence
  SAMD9L targeting guide sequence portion
uucuucugaaaaugaaguauac

SEQ ID NO: 854 - RNA, 22 nt, Artificial Sequence
  SAMD9L targeting guide sequence portion
uucuuuuuggguauacuucauu

SEQ ID NO: 855 - RNA, 22 nt, Artificial Sequence
  SAMD9L targeting guide sequence portion
uugauuauaugguucuucugaa

SEQ ID NO: 856 - RNA, 22 nt, Artificial Sequence
  SAMD9L targeting guide sequence portion
uuggguauacuucauuuucaga

SEQ ID NO: 857 - RNA, 22 nt, Artificial Sequence
  SAMD9L targeting guide sequence portion
uuucugcaauuucuuuuugggu

SEQ ID NO: 858 - RNA, 22 nt, Artificial Sequence
  SAMD9L targeting guide sequence portion
uuucuuuuuggguauacuucau

SEQ ID NO: 859 - RNA, 22 nt, Artificial Sequence
  SAMD9L targeting guide sequence portion
uuuggguauacuucauuuucag

SEQ ID NO: 860 - RNA, 22 nt, Artificial Sequence
  SAMD9L targeting guide sequence portion
uuuuggguauacuucauuuuca

SEQ ID NO: 861 - RNA, 22 nt, Artificial Sequence
  SAMD9L targeting guide sequence portion
uuuuuggguauacuucauuuuc

SEQ ID NO: 862 - RNA, 20 nt, Artificial Sequence
  SAMD9L targeting guide sequence portion
aaagaagcuguguuauacau

SEQ ID NO: 863 - RNA, 20 nt, Artificial Sequence
  SAMD9L targeting guide sequence portion
aacacagcuucuuucuuggg

SEQ ID NO: 864 - RNA, 20 nt, Artificial Sequence
  SAMD9L targeting guide sequence portion
aacuucuauuucacccaaga

SEQ ID NO: 865 - RNA, 20 nt, Artificial Sequence
  SAMD9L targeting guide sequence portion
aagaaagaagcuguguuaua

SEQ ID NO: 866 - RNA, 20 nt, Artificial Sequence
  SAMD9L targeting guide sequence portion
aagaagcuguguuauacaug

SEQ ID NO: 867 - RNA, 20 nt, Artificial Sequence
  SAMD9L targeting guide sequence portion
acacagcuucuuucuugggu

SEQ ID NO: 868 - RNA, 20 nt, Artificial Sequence
  SAMD9L targeting guide sequence portion
acagcuucuuucuuggguga

SEQ ID NO: 869 - RNA, 20 nt, Artificial Sequence
  SAMD9L targeting guide sequence portion
acauguauaacacagcuucu

SEQ ID NO: 870 - RNA, 20 nt, Artificial Sequence
  SAMD9L targeting guide sequence portion
accaacuucuauuucaccca

SEQ ID NO: 871 - RNA, 20 nt, Artificial Sequence
  SAMD9L targeting guide sequence portion
acccaagaaagaagcugugu

SEQ ID NO: 872 - RNA, 20 nt, Artificial Sequence
  SAMD9L targeting guide sequence portion
acuucuauuucacccaagaa

SEQ ID NO: 873 - RNA, 20 nt, Artificial Sequence
  SAMD9L targeting guide sequence portion
agaaagaagcuguguuauac

SEQ ID NO: 874 - RNA, 20 nt, Artificial Sequence
  SAMD9L targeting guide sequence portion
agaagcuguguuauacaugu

SEQ ID NO: 875 - RNA, 20 nt, Artificial Sequence
  SAMD9L targeting guide sequence portion
agcuucuuucuugggugaaa

SEQ ID NO: 876 - RNA, 20 nt, Artificial Sequence
  SAMD9L targeting guide sequence portion
auaacacagcuucuuucuug

SEQ ID NO: 877 - RNA, 20 nt, Artificial Sequence
  SAMD9L targeting guide sequence portion
auaugacauguauaacacag

SEQ ID NO: 878 - RNA, 20 nt, Artificial Sequence
  SAMD9L targeting guide sequence portion
augacauguauaacacagcu

SEQ ID NO: 879 - RNA, 20 nt, Artificial Sequence
  SAMD9L targeting guide sequence portion
auguauaacacagcuucuuu

SEQ ID NO: 880 - RNA, 20 nt, Artificial Sequence
  SAMD9L targeting guide sequence portion
auuucacccaagaaagaagc

SEQ ID NO: 881 - RNA, 20 nt, Artificial Sequence
  SAMD9L targeting guide sequence portion
caacuucuauuucacccaag

SEQ ID NO: 882 - RNA, 20 nt, Artificial Sequence
  SAMD9L targeting guide sequence portion
caagaaagaagcuguguuau

SEQ ID NO: 883 - RNA, 20 nt, Artificial Sequence
  SAMD9L targeting guide sequence portion
cacagcuucuuucuugggug

SEQ ID NO: 884 - RNA, 20 nt, Artificial Sequence
  SAMD9L targeting guide sequence portion
cacccaagaaagaagcugug

SEQ ID NO: 885 - RNA, 20 nt, Artificial Sequence
  SAMD9L targeting guide sequence portion
cagcuucuuucuugggugaa

SEQ ID NO: 886 - RNA, 20 nt, Artificial Sequence
  SAMD9L targeting guide sequence portion
cauguauaacacagcuucuu

SEQ ID NO: 887 - RNA, 20 nt, Artificial Sequence
  SAMD9L targeting guide sequence portion
ccaacuucuauuucacccaa

SEQ ID NO: 888 - RNA, 20 nt, Artificial Sequence
  SAMD9L targeting guide sequence portion
ccaagaaagaagcuguguua

SEQ ID NO: 889 - RNA, 20 nt, Artificial Sequence
  SAMD9L targeting guide sequence portion
cccaagaaagaagcuguguu

SEQ ID NO: 890 - RNA, 20 nt, Artificial Sequence
  SAMD9L targeting guide sequence portion
cgauaugacauguauaacac

SEQ ID NO: 891 - RNA, 20 nt, Artificial Sequence
  SAMD9L targeting guide sequence portion
cuauuucacccaagaaagaa

SEQ ID NO: 892 - RNA, 20 nt, Artificial Sequence
  SAMD9L targeting guide sequence portion
cuucuauuucacccaagaaa

SEQ ID NO: 893 - RNA, 20 nt, Artificial Sequence
  SAMD9L targeting guide sequence portion
cuucuuucuugggugaaaua

SEQ ID NO: 894 - RNA, 20 nt, Artificial Sequence
  SAMD9L targeting guide sequence portion
cuuucuugggugaaauagaa

SEQ ID NO: 895 - RNA, 20 nt, Artificial Sequence
  SAMD9L targeting guide sequence portion
gaaagaagcuguguuauaca

SEQ ID NO: 896 - RNA, 20 nt, Artificial Sequence
  SAMD9L targeting guide sequence portion
gaagcuguguuauacauguc

SEQ ID NO: 897 - RNA, 20 nt, Artificial Sequence
  SAMD9L targeting guide sequence portion
gacauguauaacacagcuuc

SEQ ID NO: 898 - RNA, 20 nt, Artificial Sequence
  SAMD9L targeting guide sequence portion
gauaugacauguauaacaca

SEQ ID NO: 899 - RNA, 20 nt, Artificial Sequence
  SAMD9L targeting guide sequence portion
gcuucuuucuugggugaaau

SEQ ID NO: 900 - RNA, 20 nt, Artificial Sequence
  SAMD9L targeting guide sequence portion
guauaacacagcuucuuucu

SEQ ID NO: 901 - RNA, 20 nt, Artificial Sequence
  SAMD9L targeting guide sequence portion
uaacacagcuucuuucuugg

SEQ ID NO: 902 - RNA, 20 nt, Artificial Sequence
  SAMD9L targeting guide sequence portion
uauaacacagcuucuuucuu

SEQ ID NO: 903 - RNA, 20 nt, Artificial Sequence
  SAMD9L targeting guide sequence portion
uaugacauguauaacacagc

SEQ ID NO: 904 - RNA, 20 nt, Artificial Sequence
  SAMD9L targeting guide sequence portion
uauuucacccaagaaagaag

SEQ ID NO: 905 - RNA, 20 nt, Artificial Sequence
  SAMD9L targeting guide sequence portion
ucacccaagaaagaagcugu

SEQ ID NO: 906 - RNA, 20 nt, Artificial Sequence
  SAMD9L targeting guide sequence portion
ucuauuucacccaagaaaga

SEQ ID NO: 907 - RNA, 20 nt, Artificial Sequence
  SAMD9L targeting guide sequence portion
ucuuucuugggugaaauaga

SEQ ID NO: 908 - RNA, 20 nt, Artificial Sequence
  SAMD9L targeting guide sequence portion
ugacauguauaacacagcuu

SEQ ID NO: 909 - RNA, 20 nt, Artificial Sequence
  SAMD9L targeting guide sequence portion
uguauaacacagcuucuuuc

SEQ ID NO: 910 - RNA, 20 nt, Artificial Sequence
  SAMD9L targeting guide sequence portion
uucacccaagaaagaagcug

SEQ ID NO: 911 - RNA, 20 nt, Artificial Sequence
  SAMD9L targeting guide sequence portion
uucuauuucacccaagaaag

SEQ ID NO: 912 - RNA, 20 nt, Artificial Sequence
  SAMD9L targeting guide sequence portion
uucuuucuugggugaaauag

SEQ ID NO: 913 - RNA, 20 nt, Artificial Sequence
  SAMD9L targeting guide sequence portion
uuucacccaagaaagaagcu

SEQ ID NO: 914 - RNA, 21 nt, Artificial Sequence
  SAMD9L targeting guide sequence portion
aaagaagcuguguuauacaug

SEQ ID NO: 915 - RNA, 21 nt, Artificial Sequence
  SAMD9L targeting guide sequence portion
aacacagcuucuuucuugggu

SEQ ID NO: 916 - RNA, 21 nt, Artificial Sequence
  SAMD9L targeting guide sequence portion
aacuucuauuucacccaagaa

SEQ ID NO: 917 - RNA, 21 nt, Artificial Sequence
  SAMD9L targeting guide sequence portion
aagaaagaagcuguguuauac

SEQ ID NO: 918 - RNA, 21 nt, Artificial Sequence
  SAMD9L targeting guide sequence portion
aagaagcuguguuauacaugu

SEQ ID NO: 919 - RNA, 21 nt, Artificial Sequence
  SAMD9L targeting guide sequence portion
acacagcuucuuucuugggug

SEQ ID NO: 920 - RNA, 21 nt, Artificial Sequence
  SAMD9L targeting guide sequence portion
acagcuucuuucuugggugaa

SEQ ID NO: 921 - RNA, 21 nt, Artificial Sequence
  SAMD9L targeting guide sequence portion
acauguauaacacagcuucuu

SEQ ID NO: 922 - RNA, 21 nt, Artificial Sequence
  SAMD9L targeting guide sequence portion
accaacuucuauuucacccaa

SEQ ID NO: 923 - RNA, 21 nt, Artificial Sequence
  SAMD9L targeting guide sequence portion
acccaagaaagaagcuguguu

SEQ ID NO: 924 - RNA, 21 nt, Artificial Sequence
  SAMD9L targeting guide sequence portion
acgauaugacauguauaacac

SEQ ID NO: 925 - RNA, 21 nt, Artificial Sequence
  SAMD9L targeting guide sequence portion
acuucuauuucacccaagaaa

SEQ ID NO: 926 - RNA, 21 nt, Artificial Sequence
  SAMD9L targeting guide sequence portion
agaaagaagcuguguuauaca

SEQ ID NO: 927 - RNA, 21 nt, Artificial Sequence
  SAMD9L targeting guide sequence portion
agaagcuguguuauacauguc

SEQ ID NO: 928 - RNA, 21 nt, Artificial Sequence
  SAMD9L targeting guide sequence portion
agcuucuuucuugggugaaau

SEQ ID NO: 929 - RNA, 21 nt, Artificial Sequence
  SAMD9L targeting guide sequence portion
auaacacagcuucuuucuugg

SEQ ID NO: 930 - RNA, 21 nt, Artificial Sequence
  SAMD9L targeting guide sequence portion
auaugacauguauaacacagc

SEQ ID NO: 931 - RNA, 21 nt, Artificial Sequence
  SAMD9L targeting guide sequence portion
augacauguauaacacagcuu

SEQ ID NO: 932 - RNA, 21 nt, Artificial Sequence
  SAMD9L targeting guide sequence portion
auguauaacacagcuucuuuc

SEQ ID NO: 933 - RNA, 21 nt, Artificial Sequence
  SAMD9L targeting guide sequence portion
auuucacccaagaaagaagcu

SEQ ID NO: 934 - RNA, 21 nt, Artificial Sequence
  SAMD9L targeting guide sequence portion
caacuucuauuucacccaaga

SEQ ID NO: 935 - RNA, 21 nt, Artificial Sequence
  SAMD9L targeting guide sequence portion
caagaaagaagcuguguuaua

SEQ ID NO: 936 - RNA, 21 nt, Artificial Sequence
  SAMD9L targeting guide sequence portion
cacagcuucuuucuuggguga

SEQ ID NO: 937 - RNA, 21 nt, Artificial Sequence
  SAMD9L targeting guide sequence portion
cacccaagaaagaagcugugu

SEQ ID NO: 938 - RNA, 21 nt, Artificial Sequence
  SAMD9L targeting guide sequence portion
cagcuucuuucuugggugaaa

SEQ ID NO: 939 - RNA, 21 nt, Artificial Sequence
  SAMD9L targeting guide sequence portion
cauguauaacacagcuucuuu

SEQ ID NO: 940 - RNA, 21 nt, Artificial Sequence
  SAMD9L targeting guide sequence portion
ccaacuucuauuucacccaag

SEQ ID NO: 941 - RNA, 21 nt, Artificial Sequence
  SAMD9L targeting guide sequence portion
ccaagaaagaagcuguguuau

SEQ ID NO: 942 - RNA, 21 nt, Artificial Sequence
  SAMD9L targeting guide sequence portion
cccaagaaagaagcuguguua

SEQ ID NO: 943 - RNA, 21 nt, Artificial Sequence
  SAMD9L targeting guide sequence portion
cgauaugacauguauaacaca

SEQ ID NO: 944 - RNA, 21 nt, Artificial Sequence
  SAMD9L targeting guide sequence portion
cuauuucacccaagaaagaag

SEQ ID NO: 945 - RNA, 21 nt, Artificial Sequence
  SAMD9L targeting guide sequence portion
cuucuauuucacccaagaaag

SEQ ID NO: 946 - RNA, 21 nt, Artificial Sequence
  SAMD9L targeting guide sequence portion
cuucuuucuugggugaaauag

SEQ ID NO: 947 - RNA, 21 nt, Artificial Sequence
  SAMD9L targeting guide sequence portion
cuuucuugggugaaauagaag

SEQ ID NO: 948 - RNA, 21 nt, Artificial Sequence
  SAMD9L targeting guide sequence portion
gaaagaagcuguguuauacau

SEQ ID NO: 949 - RNA, 21 nt, Artificial Sequence
  SAMD9L targeting guide sequence portion
gaagcuguguuauacauguca

SEQ ID NO: 950 - RNA, 21 nt, Artificial Sequence
  SAMD9L targeting guide sequence portion
gacauguauaacacagcuucu

SEQ ID NO: 951 - RNA, 21 nt, Artificial Sequence
  SAMD9L targeting guide sequence portion
gaccaacuucuauuucaccca

SEQ ID NO: 952 - RNA, 21 nt, Artificial Sequence
  SAMD9L targeting guide sequence portion
gauaugacauguauaacacag

SEQ ID NO: 953 - RNA, 21 nt, Artificial Sequence
  SAMD9L targeting guide sequence portion
gcuucuuucuugggugaaaua

SEQ ID NO: 954 - RNA, 21 nt, Artificial Sequence
  SAMD9L targeting guide sequence portion
guauaacacagcuucuuucuu

SEQ ID NO: 955 - RNA, 21 nt, Artificial Sequence
  SAMD9L targeting guide sequence portion
uaacacagcuucuuucuuggg

SEQ ID NO: 956 - RNA, 21 nt, Artificial Sequence
  SAMD9L targeting guide sequence portion
uauaacacagcuucuuucuug

SEQ ID NO: 957 - RNA, 21 nt, Artificial Sequence
  SAMD9L targeting guide sequence portion
uaugacauguauaacacagcu

SEQ ID NO: 958 - RNA, 21 nt, Artificial Sequence
  SAMD9L targeting guide sequence portion
uauuucacccaagaaagaagc

SEQ ID NO: 959 - RNA, 21 nt, Artificial Sequence
  SAMD9L targeting guide sequence portion
ucacccaagaaagaagcugug

SEQ ID NO: 960 - RNA, 21 nt, Artificial Sequence
  SAMD9L targeting guide sequence portion
ucuauuucacccaagaaagaa

SEQ ID NO: 961 - RNA, 21 nt, Artificial Sequence
  SAMD9L targeting guide sequence portion
ucuuucuugggugaaauagaa

SEQ ID NO: 962 - RNA, 21 nt, Artificial Sequence
  SAMD9L targeting guide sequence portion
ugacauguauaacacagcuuc

SEQ ID NO: 963 - RNA, 21 nt, Artificial Sequence
  SAMD9L targeting guide sequence portion
uguauaacacagcuucuuucu

SEQ ID NO: 964 - RNA, 21 nt, Artificial Sequence
  SAMD9L targeting guide sequence portion
uucacccaagaaagaagcugu

SEQ ID NO: 965 - RNA, 21 nt, Artificial Sequence
  SAMD9L targeting guide sequence portion
uucuauuucacccaagaaaga

SEQ ID NO: 966 - RNA, 21 nt, Artificial Sequence
  SAMD9L targeting guide sequence portion
uucuuucuugggugaaauaga

SEQ ID NO: 967 - RNA, 21 nt, Artificial Sequence
  SAMD9L targeting guide sequence portion
uuucacccaagaaagaagcug

SEQ ID NO: 968 - RNA, 22 nt, Artificial Sequence
  SAMD9L targeting guide sequence portion
aaagaagcuguguuauacaugu

SEQ ID NO: 969 - RNA, 22 nt, Artificial Sequence
  SAMD9L targeting guide sequence portion
aacacagcuucuuucuugggug

SEQ ID NO: 970 - RNA, 22 nt, Artificial Sequence
  SAMD9L targeting guide sequence portion
aacuucuauuucacccaagaaa

SEQ ID NO: 971 - RNA, 22 nt, Artificial Sequence
  SAMD9L targeting guide sequence portion
aagaaagaagcuguguuauaca

SEQ ID NO: 972 - RNA, 22 nt, Artificial Sequence
  SAMD9L targeting guide sequence portion
aagaagcuguguuauacauguc

SEQ ID NO: 973 - RNA, 22 nt, Artificial Sequence
  SAMD9L targeting guide sequence portion
acacagcuucuuucuuggguga

SEQ ID NO: 974 - RNA, 22 nt, Artificial Sequence
  SAMD9L targeting guide sequence portion
acagcuucuuucuugggugaaa

SEQ ID NO: 975 - RNA, 22 nt, Artificial Sequence
  SAMD9L targeting guide sequence portion
acauguauaacacagcuucuuu

SEQ ID NO: 976 - RNA, 22 nt, Artificial Sequence
  SAMD9L targeting guide sequence portion
accaacuucuauuucacccaag

SEQ ID NO: 977 - RNA, 22 nt, Artificial Sequence
  SAMD9L targeting guide sequence portion
acccaagaaagaagcuguguua

SEQ ID NO: 978 - RNA, 22 nt, Artificial Sequence
  SAMD9L targeting guide sequence portion
acgauaugacauguauaacaca

SEQ ID NO: 979 - RNA, 22 nt, Artificial Sequence
  SAMD9L targeting guide sequence portion
acuucuauuucacccaagaaag

SEQ ID NO: 980 - RNA, 22 nt, Artificial Sequence
  SAMD9L targeting guide sequence portion
agaaagaagcuguguuauacau

SEQ ID NO: 981 - RNA, 22 nt, Artificial Sequence
  SAMD9L targeting guide sequence portion
agaagcuguguuauacauguca

SEQ ID NO: 982 - RNA, 22 nt, Artificial Sequence
  SAMD9L targeting guide sequence portion
agaccaacuucuauuucaccca

SEQ ID NO: 983 - RNA, 22 nt, Artificial Sequence
  SAMD9L targeting guide sequence portion
agcuucuuucuugggugaaaua

SEQ ID NO: 984 - RNA, 22 nt, Artificial Sequence
  SAMD9L targeting guide sequence portion
auaacacagcuucuuucuuggg

SEQ ID NO: 985 - RNA, 22 nt, Artificial Sequence
  SAMD9L targeting guide sequence portion
auaugacauguauaacacagcu

SEQ ID NO: 986 - RNA, 22 nt, Artificial Sequence
  SAMD9L targeting guide sequence portion
augacauguauaacacagcuuc

SEQ ID NO: 987 - RNA, 22 nt, Artificial Sequence
  SAMD9L targeting guide sequence portion
auguauaacacagcuucuuucu

SEQ ID NO: 988 - RNA, 22 nt, Artificial Sequence
  SAMD9L targeting guide sequence portion
auuucacccaagaaagaagcug

SEQ ID NO: 989 - RNA, 22 nt, Artificial Sequence
  SAMD9L targeting guide sequence portion
caacuucuauuucacccaagaa

SEQ ID NO: 990 - RNA, 22 nt, Artificial Sequence
  SAMD9L targeting guide sequence portion
caagaaagaagcuguguuauac

SEQ ID NO: 991 - RNA, 22 nt, Artificial Sequence
  SAMD9L targeting guide sequence portion
cacagcuucuuucuugggugaa

SEQ ID NO: 992 - RNA, 22 nt, Artificial Sequence
  SAMD9L targeting guide sequence portion
cacccaagaaagaagcuguguu

SEQ ID NO: 993 - RNA, 22 nt, Artificial Sequence
  SAMD9L targeting guide sequence portion
cagcuucuuucuugggugaaau

SEQ ID NO: 994 - RNA, 22 nt, Artificial Sequence
  SAMD9L targeting guide sequence portion
cauguauaacacagcuucuuuc

SEQ ID NO: 995 - RNA, 22 nt, Artificial Sequence
  SAMD9L targeting guide sequence portion
ccaacuucuauuucacccaaga

SEQ ID NO: 996 - RNA, 22 nt, Artificial Sequence
  SAMD9L targeting guide sequence portion
ccaagaaagaagcuguguuaua

SEQ ID NO: 997 - RNA, 22 nt, Artificial Sequence
  SAMD9L targeting guide sequence portion
cccaagaaagaagcuguguuau

SEQ ID NO: 998 - RNA, 22 nt, Artificial Sequence
  SAMD9L targeting guide sequence portion
cgauaugacauguauaacacag

SEQ ID NO: 999 - RNA, 22 nt, Artificial Sequence
  SAMD9L targeting guide sequence portion
cuauuucacccaagaaagaagc

SEQ ID NO: 1000 - RNA, 22 nt, Artificial Sequence
  SAMD9L targeting guide sequence portion
cuucuauuucacccaagaaaga

SEQ ID NO: 1001 - RNA, 22 nt, Artificial Sequence
  SAMD9L targeting guide sequence portion
cuucuuucuugggugaaauaga

SEQ ID NO: 1002 - RNA, 22 nt, Artificial Sequence
  SAMD9L targeting guide sequence portion
cuuucuugggugaaauagaagu

SEQ ID NO: 1003 - RNA, 22 nt, Artificial Sequence
  SAMD9L targeting guide sequence portion
gaaagaagcuguguuauacaug

SEQ ID NO: 1004 - RNA, 22 nt, Artificial Sequence
  SAMD9L targeting guide sequence portion
gaagcuguguuauacaugucau

SEQ ID NO: 1005 - RNA, 22 nt, Artificial Sequence
  SAMD9L targeting guide sequence portion
gacauguauaacacagcuucuu

SEQ ID NO: 1006 - RNA, 22 nt, Artificial Sequence
  SAMD9L targeting guide sequence portion
gaccaacuucuauuucacccaa

SEQ ID NO: 1007 - RNA, 22 nt, Artificial Sequence
  SAMD9L targeting guide sequence portion
gacgauaugacauguauaacac

SEQ ID NO: 1008 - RNA, 22 nt, Artificial Sequence
  SAMD9L targeting guide sequence portion
gauaugacauguauaacacagc

SEQ ID NO: 1009 - RNA, 22 nt, Artificial Sequence
  SAMD9L targeting guide sequence portion
gcuucuuucuugggugaaauag

SEQ ID NO: 1010 - RNA, 22 nt, Artificial Sequence
  SAMD9L targeting guide sequence portion
guauaacacagcuucuuucuug

SEQ ID NO: 1011 - RNA, 22 nt, Artificial Sequence
  SAMD9L targeting guide sequence portion
uaacacagcuucuuucuugggu

SEQ ID NO: 1012 - RNA, 22 nt, Artificial Sequence
  SAMD9L targeting guide sequence portion
uauaacacagcuucuuucuugg

SEQ ID NO: 1013 - RNA, 22 nt, Artificial Sequence
  SAMD9L targeting guide sequence portion
uaugacauguauaacacagcuu

SEQ ID NO: 1014 - RNA, 22 nt, Artificial Sequence
  SAMD9L targeting guide sequence portion
uauuucacccaagaaagaagcu

SEQ ID NO: 1015 - RNA, 22 nt, Artificial Sequence
  SAMD9L targeting guide sequence portion
ucacccaagaaagaagcugugu

SEQ ID NO: 1016 - RNA, 22 nt, Artificial Sequence
  SAMD9L targeting guide sequence portion
ucuauuucacccaagaaagaag

SEQ ID NO: 1017 - RNA, 22 nt, Artificial Sequence
  SAMD9L targeting guide sequence portion
ucuuucuugggugaaauagaag

SEQ ID NO: 1018 - RNA, 22 nt, Artificial Sequence
  SAMD9L targeting guide sequence portion
ugacauguauaacacagcuucu

SEQ ID NO: 1019 - RNA, 22 nt, Artificial Sequence
  SAMD9L targeting guide sequence portion
uguauaacacagcuucuuucuu

SEQ ID NO: 1020 - RNA, 22 nt, Artificial Sequence
  SAMD9L targeting guide sequence portion
uucacccaagaaagaagcugug

SEQ ID NO: 1021 - RNA, 22 nt, Artificial Sequence
  SAMD9L targeting guide sequence portion
uucuauuucacccaagaaagaa

SEQ ID NO: 1022 - RNA, 22 nt, Artificial Sequence
  SAMD9L targeting guide sequence portion
uucuuucuugggugaaauagaa

SEQ ID NO: 1023 - RNA, 22 nt, Artificial Sequence
  SAMD9L targeting guide sequence portion
uuucacccaagaaagaagcugu

SEQ ID NO: 1024 - RNA, 20 nt, Artificial Sequence
  SAMD9L targeting guide sequence portion
aaaaacuaugaaaccgagaa

SEQ ID NO: 1025 - RNA, 20 nt, Artificial Sequence
  SAMD9L targeting guide sequence portion
aaaacuaugaaaccgagaac

SEQ ID NO: 1026 - RNA, 20 nt, Artificial Sequence
  SAMD9L targeting guide sequence portion
aaaccgagaacaggucacca

SEQ ID NO: 1027 - RNA, 20 nt, Artificial Sequence
  SAMD9L targeting guide sequence portion
aaacuaugaaaccgagaaca

SEQ ID NO: 1028 - RNA, 20 nt, Artificial Sequence
  SAMD9L targeting guide sequence portion
aacaggucaccacagaaguc

SEQ ID NO: 1029 - RNA, 20 nt, Artificial Sequence
  SAMD9L targeting guide sequence portion
aaccgagaacaggucaccac

SEQ ID NO: 1030 - RNA, 20 nt, Artificial Sequence
  SAMD9L targeting guide sequence portion
aacuaugaaaccgagaacag

SEQ ID NO: 1031 - RNA, 20 nt, Artificial Sequence
  SAMD9L targeting guide sequence portion
acaggucaccacagaagucc

SEQ ID NO: 1032 - RNA, 20 nt, Artificial Sequence
  SAMD9L targeting guide sequence portion
accgagaacaggucaccaca

SEQ ID NO: 1033 - RNA, 20 nt, Artificial Sequence
  SAMD9L targeting guide sequence portion
accuguucucgguuucauag

SEQ ID NO: 1034 - RNA, 20 nt, Artificial Sequence
  SAMD9L targeting guide sequence portion
acuaugaaaccgagaacagg

SEQ ID NO: 1035 - RNA, 20 nt, Artificial Sequence
  SAMD9L targeting guide sequence portion
acuucuguggugaccuguuc

SEQ ID NO: 1036 - RNA, 20 nt, Artificial Sequence
  SAMD9L targeting guide sequence portion
agaacaggucaccacagaag

SEQ ID NO: 1037 - RNA, 20 nt, Artificial Sequence
  SAMD9L targeting guide sequence portion
aggucaccacagaaguccca

SEQ ID NO: 1038 - RNA, 20 nt, Artificial Sequence
  SAMD9L targeting guide sequence portion
aguaaaaacuaugaaaccga

SEQ ID NO: 1039 - RNA, 20 nt, Artificial Sequence
  SAMD9L targeting guide sequence portion
augaaaccgagaacagguca

SEQ ID NO: 1040 - RNA, 20 nt, Artificial Sequence
  SAMD9L targeting guide sequence portion
caggucaccacagaaguccc

SEQ ID NO: 1041 - RNA, 20 nt, Artificial Sequence
  SAMD9L targeting guide sequence portion
ccgagaacaggucaccacag

SEQ ID NO: 1042 - RNA, 20 nt, Artificial Sequence
  SAMD9L targeting guide sequence portion
ccuguucucgguuucauagu

SEQ ID NO: 1043 - RNA, 20 nt, Artificial Sequence
  SAMD9L targeting guide sequence portion
cgagaacaggucaccacaga

SEQ ID NO: 1044 - RNA, 20 nt, Artificial Sequence
  SAMD9L targeting guide sequence portion
cgucucugggacuucugugg

SEQ ID NO: 1045 - RNA, 20 nt, Artificial Sequence
  SAMD9L targeting guide sequence portion
cuaugaaaccgagaacaggu

SEQ ID NO: 1046 - RNA, 20 nt, Artificial Sequence
  SAMD9L targeting guide sequence portion
cucugggacuucugugguga

SEQ ID NO: 1047 - RNA, 20 nt, Artificial Sequence
  SAMD9L targeting guide sequence portion
cugggacuucuguggugacc

SEQ ID NO: 1048 - RNA, 20 nt, Artificial Sequence
  SAMD9L targeting guide sequence portion
cuguggugaccuguucucgg

SEQ ID NO: 1049 - RNA, 20 nt, Artificial Sequence
  SAMD9L targeting guide sequence portion
cuguucucgguuucauaguu

SEQ ID NO: 1050 - RNA, 20 nt, Artificial Sequence
  SAMD9L targeting guide sequence portion
cuucuguggugaccuguucu

SEQ ID NO: 1051 - RNA, 20 nt, Artificial Sequence
  SAMD9L targeting guide sequence portion
gaaaccgagaacaggucacc

SEQ ID NO: 1052 - RNA, 20 nt, Artificial Sequence
  SAMD9L targeting guide sequence portion
gaacaggucaccacagaagu

SEQ ID NO: 1053 - RNA, 20 nt, Artificial Sequence
  SAMD9L targeting guide sequence portion
gaccuguucucgguuucaua

SEQ ID NO: 1054 - RNA, 20 nt, Artificial Sequence
  SAMD9L targeting guide sequence portion
gacuucuguggugaccuguu

SEQ ID NO: 1055 - RNA, 20 nt, Artificial Sequence
  SAMD9L targeting guide sequence portion
gagaacaggucaccacagaa

SEQ ID NO: 1056 - RNA, 20 nt, Artificial Sequence
  SAMD9L targeting guide sequence portion
ggacuucuguggugaccugu

SEQ ID NO: 1057 - RNA, 20 nt, Artificial Sequence
  SAMD9L targeting guide sequence portion
gggacuucuguggugaccug

SEQ ID NO: 1058 - RNA, 20 nt, Artificial Sequence
  SAMD9L targeting guide sequence portion
ggugaccuguucucgguuuc

SEQ ID NO: 1059 - RNA, 20 nt, Artificial Sequence
  SAMD9L targeting guide sequence portion
guaaaaacuaugaaaccgag

SEQ ID NO: 1060 - RNA, 20 nt, Artificial Sequence
  SAMD9L targeting guide sequence portion
gucucugggacuucuguggu

SEQ ID NO: 1061 - RNA, 20 nt, Artificial Sequence
  SAMD9L targeting guide sequence portion
gugaccuguucucgguuuca

SEQ ID NO: 1062 - RNA, 20 nt, Artificial Sequence
  SAMD9L targeting guide sequence portion
guggugaccuguucucgguu

SEQ ID NO: 1063 - RNA, 20 nt, Artificial Sequence
  SAMD9L targeting guide sequence portion
uaaaaacuaugaaaccgaga

SEQ ID NO: 1064 - RNA, 20 nt, Artificial Sequence
  SAMD9L targeting guide sequence portion
uaguaaaaacuaugaaaccg

SEQ ID NO: 1065 - RNA, 20 nt, Artificial Sequence
  SAMD9L targeting guide sequence portion
uaugaaaccgagaacagguc

SEQ ID NO: 1066 - RNA, 20 nt, Artificial Sequence
  SAMD9L targeting guide sequence portion
ucucugggacuucuguggug

SEQ ID NO: 1067 - RNA, 20 nt, Artificial Sequence
  SAMD9L targeting guide sequence portion
ucugggacuucuguggugac

SEQ ID NO: 1068 - RNA, 20 nt, Artificial Sequence
  SAMD9L targeting guide sequence portion
ucuguggugaccuguucucg

SEQ ID NO: 1069 - RNA, 20 nt, Artificial Sequence
  SAMD9L targeting guide sequence portion
ugaaaccgagaacaggucac

SEQ ID NO: 1070 - RNA, 20 nt, Artificial Sequence
  SAMD9L targeting guide sequence portion
ugaccuguucucgguuucau

SEQ ID NO: 1071 - RNA, 20 nt, Artificial Sequence
  SAMD9L targeting guide sequence portion
ugggacuucuguggugaccu

SEQ ID NO: 1072 - RNA, 20 nt, Artificial Sequence
  SAMD9L targeting guide sequence portion
uggugaccuguucucgguuu

SEQ ID NO: 1073 - RNA, 20 nt, Artificial Sequence
  SAMD9L targeting guide sequence portion
uguggugaccuguucucggu

SEQ ID NO: 1074 - RNA, 20 nt, Artificial Sequence
  SAMD9L targeting guide sequence portion
uguucucgguuucauaguuu

SEQ ID NO: 1075 - RNA, 20 nt, Artificial Sequence
  SAMD9L targeting guide sequence portion
uucuguggugaccuguucuc

SEQ ID NO: 1076 - RNA, 21 nt, Artificial Sequence
  SAMD9L targeting guide sequence portion
aaaaacuaugaaaccgagaac

SEQ ID NO: 1077 - RNA, 21 nt, Artificial Sequence
  SAMD9L targeting guide sequence portion
aaaacuaugaaaccgagaaca

SEQ ID NO: 1078 - RNA, 21 nt, Artificial Sequence
  SAMD9L targeting guide sequence portion
aaaccgagaacaggucaccac

SEQ ID NO: 1079 - RNA, 21 nt, Artificial Sequence
  SAMD9L targeting guide sequence portion
aaacuaugaaaccgagaacag

SEQ ID NO: 1080 - RNA, 21 nt, Artificial Sequence
  SAMD9L targeting guide sequence portion
aacaggucaccacagaagucc

SEQ ID NO: 1081 - RNA, 21 nt, Artificial Sequence
  SAMD9L targeting guide sequence portion
aaccgagaacaggucaccaca

SEQ ID NO: 1082 - RNA, 21 nt, Artificial Sequence
  SAMD9L targeting guide sequence portion
aacuaugaaaccgagaacagg

SEQ ID NO: 1083 - RNA, 21 nt, Artificial Sequence
  SAMD9L targeting guide sequence portion
acaggucaccacagaaguccc

SEQ ID NO: 1084 - RNA, 21 nt, Artificial Sequence
  SAMD9L targeting guide sequence portion
accgagaacaggucaccacag

SEQ ID NO: 1085 - RNA, 21 nt, Artificial Sequence
  SAMD9L targeting guide sequence portion
accuguucucgguuucauagu

SEQ ID NO: 1086 - RNA, 21 nt, Artificial Sequence
  SAMD9L targeting guide sequence portion
acuaugaaaccgagaacaggu

SEQ ID NO: 1087 - RNA, 21 nt, Artificial Sequence
  SAMD9L targeting guide sequence portion
acuucuguggugaccuguucu

SEQ ID NO: 1088 - RNA, 21 nt, Artificial Sequence
  SAMD9L targeting guide sequence portion
agaacaggucaccacagaagu

SEQ ID NO: 1089 - RNA, 21 nt, Artificial Sequence
  SAMD9L targeting guide sequence portion
aggucaccacagaagucccag

SEQ ID NO: 1090 - RNA, 21 nt, Artificial Sequence
  SAMD9L targeting guide sequence portion
aguaaaaacuaugaaaccgag

SEQ ID NO: 1091 - RNA, 21 nt, Artificial Sequence
  SAMD9L targeting guide sequence portion
auaguaaaaacuaugaaaccg

SEQ ID NO: 1092 - RNA, 21 nt, Artificial Sequence
  SAMD9L targeting guide sequence portion
augaaaccgagaacaggucac

SEQ ID NO: 1093 - RNA, 21 nt, Artificial Sequence
  SAMD9L targeting guide sequence portion
caggucaccacagaaguccca

SEQ ID NO: 1094 - RNA, 21 nt, Artificial Sequence
  SAMD9L targeting guide sequence portion
ccgagaacaggucaccacaga

SEQ ID NO: 1095 - RNA, 21 nt, Artificial Sequence
  SAMD9L targeting guide sequence portion
ccuguucucgguuucauaguu

SEQ ID NO: 1096 - RNA, 21 nt, Artificial Sequence
  SAMD9L targeting guide sequence portion
cgagaacaggucaccacagaa

SEQ ID NO: 1097 - RNA, 21 nt, Artificial Sequence
  SAMD9L targeting guide sequence portion
cgucucugggacuucuguggu

SEQ ID NO: 1098 - RNA, 21 nt, Artificial Sequence
  SAMD9L targeting guide sequence portion
cuaugaaaccgagaacagguc

SEQ ID NO: 1099 - RNA, 21 nt, Artificial Sequence
  SAMD9L targeting guide sequence portion
cucugggacuucuguggugac

SEQ ID NO: 1100 - RNA, 21 nt, Artificial Sequence
  SAMD9L targeting guide sequence portion
cugggacuucuguggugaccu

SEQ ID NO: 1101 - RNA, 21 nt, Artificial Sequence
  SAMD9L targeting guide sequence portion
cuguggugaccuguucucggu

SEQ ID NO: 1102 - RNA, 21 nt, Artificial Sequence
  SAMD9L targeting guide sequence portion
cuguucucgguuucauaguuu

SEQ ID NO: 1103 - RNA, 21 nt, Artificial Sequence
  SAMD9L targeting guide sequence portion
cuucuguggugaccuguucuc

SEQ ID NO: 1104 - RNA, 21 nt, Artificial Sequence
  SAMD9L targeting guide sequence portion
gaaaccgagaacaggucacca

SEQ ID NO: 1105 - RNA, 21 nt, Artificial Sequence
  SAMD9L targeting guide sequence portion
gaacaggucaccacagaaguc

SEQ ID NO: 1106 - RNA, 21 nt, Artificial Sequence
  SAMD9L targeting guide sequence portion
gaccuguucucgguuucauag

SEQ ID NO: 1107 - RNA, 21 nt, Artificial Sequence
  SAMD9L targeting guide sequence portion
gacuucuguggugaccuguuc

SEQ ID NO: 1108 - RNA, 21 nt, Artificial Sequence
  SAMD9L targeting guide sequence portion
gagaacaggucaccacagaag

SEQ ID NO: 1109 - RNA, 21 nt, Artificial Sequence
  SAMD9L targeting guide sequence portion
ggacuucuguggugaccuguu

SEQ ID NO: 1110 - RNA, 21 nt, Artificial Sequence
  SAMD9L targeting guide sequence portion
gggacuucuguggugaccugu

SEQ ID NO: 1111 - RNA, 21 nt, Artificial Sequence
  SAMD9L targeting guide sequence portion
ggugaccuguucucgguuuca

SEQ ID NO: 1112 - RNA, 21 nt, Artificial Sequence
  SAMD9L targeting guide sequence portion
guaaaaacuaugaaaccgaga

SEQ ID NO: 1113 - RNA, 21 nt, Artificial Sequence
  SAMD9L targeting guide sequence portion
gucucugggacuucuguggug

SEQ ID NO: 1114 - RNA, 21 nt, Artificial Sequence
  SAMD9L targeting guide sequence portion
gugaccuguucucgguuucau

SEQ ID NO: 1115 - RNA, 21 nt, Artificial Sequence
  SAMD9L targeting guide sequence portion
guggugaccuguucucgguuu

SEQ ID NO: 1116 - RNA, 21 nt, Artificial Sequence
  SAMD9L targeting guide sequence portion
uaaaaacuaugaaaccgagaa

SEQ ID NO: 1117 - RNA, 21 nt, Artificial Sequence
  SAMD9L targeting guide sequence portion
uaguaaaaacuaugaaaccga

SEQ ID NO: 1118 - RNA, 21 nt, Artificial Sequence
  SAMD9L targeting guide sequence portion
uaugaaaccgagaacagguca

SEQ ID NO: 1119 - RNA, 21 nt, Artificial Sequence
  SAMD9L targeting guide sequence portion
ucgucucugggacuucugugg

SEQ ID NO: 1120 - RNA, 21 nt, Artificial Sequence
  SAMD9L targeting guide sequence portion
ucucugggacuucugugguga

SEQ ID NO: 1121 - RNA, 21 nt, Artificial Sequence
  SAMD9L targeting guide sequence portion
ucugggacuucuguggugacc

SEQ ID NO: 1122 - RNA, 21 nt, Artificial Sequence
  SAMD9L targeting guide sequence portion
ucuguggugaccuguucucgg

SEQ ID NO: 1123 - RNA, 21 nt, Artificial Sequence
  SAMD9L targeting guide sequence portion
ugaaaccgagaacaggucacc

SEQ ID NO: 1124 - RNA, 21 nt, Artificial Sequence
  SAMD9L targeting guide sequence portion
ugaccuguucucgguuucaua

SEQ ID NO: 1125 - RNA, 21 nt, Artificial Sequence
  SAMD9L targeting guide sequence portion
ugggacuucuguggugaccug

SEQ ID NO: 1126 - RNA, 21 nt, Artificial Sequence
  SAMD9L targeting guide sequence portion
uggugaccuguucucgguuuc

SEQ ID NO: 1127 - RNA, 21 nt, Artificial Sequence
  SAMD9L targeting guide sequence portion
uguggugaccuguucucgguu

SEQ ID NO: 1128 - RNA, 21 nt, Artificial Sequence
  SAMD9L targeting guide sequence portion
uguucucgguuucauaguuuu

SEQ ID NO: 1129 - RNA, 21 nt, Artificial Sequence
  SAMD9L targeting guide sequence portion
uucuguggugaccuguucucg

SEQ ID NO: 1130 - RNA, 22 nt, Artificial Sequence
  SAMD9L targeting guide sequence portion
aaaaacuaugaaaccgagaaca

SEQ ID NO: 1131 - RNA, 22 nt, Artificial Sequence
  SAMD9L targeting guide sequence portion
aaaacuaugaaaccgagaacag

SEQ ID NO: 1132 - RNA, 22 nt, Artificial Sequence
  SAMD9L targeting guide sequence portion
aaaccgagaacaggucaccaca

SEQ ID NO: 1133 - RNA, 22 nt, Artificial Sequence
  SAMD9L targeting guide sequence portion
aaacuaugaaaccgagaacagg

SEQ ID NO: 1134 - RNA, 22 nt, Artificial Sequence
  SAMD9L targeting guide sequence portion
aacaggucaccacagaaguccc

SEQ ID NO: 1135 - RNA, 22 nt, Artificial Sequence
  SAMD9L targeting guide sequence portion
aaccgagaacaggucaccacag

SEQ ID NO: 1136 - RNA, 22 nt, Artificial Sequence
  SAMD9L targeting guide sequence portion
aacuaugaaaccgagaacaggu

SEQ ID NO: 1137 - RNA, 22 nt, Artificial Sequence
  SAMD9L targeting guide sequence portion
acaggucaccacagaaguccca

SEQ ID NO: 1138 - RNA, 22 nt, Artificial Sequence
  SAMD9L targeting guide sequence portion
accgagaacaggucaccacaga

SEQ ID NO: 1139 - RNA, 22 nt, Artificial Sequence
  SAMD9L targeting guide sequence portion
accuguucucgguuucauaguu

SEQ ID NO: 1140 - RNA, 22 nt, Artificial Sequence
  SAMD9L targeting guide sequence portion
acuaugaaaccgagaacagguc

SEQ ID NO: 1141 - RNA, 22 nt, Artificial Sequence
  SAMD9L targeting guide sequence portion
acuucuguggugaccuguucuc

SEQ ID NO: 1142 - RNA, 22 nt, Artificial Sequence
  SAMD9L targeting guide sequence portion
agaacaggucaccacagaaguc

SEQ ID NO: 1143 - RNA, 22 nt, Artificial Sequence
  SAMD9L targeting guide sequence portion
aggucaccacagaagucccaga

SEQ ID NO: 1144 - RNA, 22 nt, Artificial Sequence
  SAMD9L targeting guide sequence portion
aguaaaaacuaugaaaccgaga

SEQ ID NO: 1145 - RNA, 22 nt, Artificial Sequence
  SAMD9L targeting guide sequence portion
auaguaaaaacuaugaaaccga

SEQ ID NO: 1146 - RNA, 22 nt, Artificial Sequence
  SAMD9L targeting guide sequence portion
aucgucucugggacuucugugg

SEQ ID NO: 1147 - RNA, 22 nt, Artificial Sequence
  SAMD9L targeting guide sequence portion
augaaaccgagaacaggucacc

SEQ ID NO: 1148 - RNA, 22 nt, Artificial Sequence
  SAMD9L targeting guide sequence portion
caggucaccacagaagucccag

SEQ ID NO: 1149 - RNA, 22 nt, Artificial Sequence
  SAMD9L targeting guide sequence portion
ccgagaacaggucaccacagaa

SEQ ID NO: 1150 - RNA, 22 nt, Artificial Sequence
  SAMD9L targeting guide sequence portion
ccuguucucgguuucauaguuu

SEQ ID NO: 1151 - RNA, 22 nt, Artificial Sequence
  SAMD9L targeting guide sequence portion
cgagaacaggucaccacagaag

SEQ ID NO: 1152 - RNA, 22 nt, Artificial Sequence
  SAMD9L targeting guide sequence portion
cgucucugggacuucuguggug

SEQ ID NO: 1153 - RNA, 22 nt, Artificial Sequence
  SAMD9L targeting guide sequence portion
cuaugaaaccgagaacagguca

SEQ ID NO: 1154 - RNA, 22 nt, Artificial Sequence
  SAMD9L targeting guide sequence portion
cucugggacuucuguggugacc

SEQ ID NO: 1155 - RNA, 22 nt, Artificial Sequence
  SAMD9L targeting guide sequence portion
cugggacuucuguggugaccug

SEQ ID NO: 1156 - RNA, 22 nt, Artificial Sequence
  SAMD9L targeting guide sequence portion
cuguggugaccuguucucgguu

SEQ ID NO: 1157 - RNA, 22 nt, Artificial Sequence
  SAMD9L targeting guide sequence portion
cuguucucgguuucauaguuuu

SEQ ID NO: 1158 - RNA, 22 nt, Artificial Sequence
  SAMD9L targeting guide sequence portion
cuucuguggugaccuguucucg

SEQ ID NO: 1159 - RNA, 22 nt, Artificial Sequence
  SAMD9L targeting guide sequence portion
gaaaccgagaacaggucaccac

SEQ ID NO: 1160 - RNA, 22 nt, Artificial Sequence
  SAMD9L targeting guide sequence portion
gaacaggucaccacagaagucc

SEQ ID NO: 1161 - RNA, 22 nt, Artificial Sequence
  SAMD9L targeting guide sequence portion
gaccuguucucgguuucauagu

SEQ ID NO: 1162 - RNA, 22 nt, Artificial Sequence
  SAMD9L targeting guide sequence portion
gacuucuguggugaccuguucu

SEQ ID NO: 1163 - RNA, 22 nt, Artificial Sequence
  SAMD9L targeting guide sequence portion
gagaacaggucaccacagaagu

SEQ ID NO: 1164 - RNA, 22 nt, Artificial Sequence
  SAMD9L targeting guide sequence portion
gauaguaaaaacuaugaaaccg

SEQ ID NO: 1165 - RNA, 22 nt, Artificial Sequence
  SAMD9L targeting guide sequence portion
ggacuucuguggugaccuguuc

SEQ ID NO: 1166 - RNA, 22 nt, Artificial Sequence
  SAMD9L targeting guide sequence portion
gggacuucuguggugaccuguu

SEQ ID NO: 1167 - RNA, 22 nt, Artificial Sequence
  SAMD9L targeting guide sequence portion
ggugaccuguucucgguuucau

SEQ ID NO: 1168 - RNA, 22 nt, Artificial Sequence
  SAMD9L targeting guide sequence portion
guaaaaacuaugaaaccgagaa

SEQ ID NO: 1169 - RNA, 22 nt, Artificial Sequence
  SAMD9L targeting guide sequence portion
gucucugggacuucugugguga

SEQ ID NO: 1170 - RNA, 22 nt, Artificial Sequence
  SAMD9L targeting guide sequence portion
gugaccuguucucgguuucaua

SEQ ID NO: 1171 - RNA, 22 nt, Artificial Sequence
  SAMD9L targeting guide sequence portion
guggugaccuguucucgguuuc

SEQ ID NO: 1172 - RNA, 22 nt, Artificial Sequence
  SAMD9L targeting guide sequence portion
uaaaaacuaugaaaccgagaac

SEQ ID NO: 1173 - RNA, 22 nt, Artificial Sequence
  SAMD9L targeting guide sequence portion
uaguaaaaacuaugaaaccgag

SEQ ID NO: 1174 - RNA, 22 nt, Artificial Sequence
  SAMD9L targeting guide sequence portion
uaugaaaccgagaacaggucac

SEQ ID NO: 1175 - RNA, 22 nt, Artificial Sequence
  SAMD9L targeting guide sequence portion
ucgucucugggacuucuguggu

SEQ ID NO: 1176 - RNA, 22 nt, Artificial Sequence
  SAMD9L targeting guide sequence portion
ucucugggacuucuguggugac

SEQ ID NO: 1177 - RNA, 22 nt, Artificial Sequence
  SAMD9L targeting guide sequence portion
ucugggacuucuguggugaccu

SEQ ID NO: 1178 - RNA, 22 nt, Artificial Sequence
  SAMD9L targeting guide sequence portion
ucuguggugaccuguucucggu

SEQ ID NO: 1179 - RNA, 22 nt, Artificial Sequence
  SAMD9L targeting guide sequence portion
ugaaaccgagaacaggucacca

SEQ ID NO: 1180 - RNA, 22 nt, Artificial Sequence
  SAMD9L targeting guide sequence portion
ugaccuguucucgguuucauag

SEQ ID NO: 1181 - RNA, 22 nt, Artificial Sequence
  SAMD9L targeting guide sequence portion
ugggacuucuguggugaccugu

SEQ ID NO: 1182 - RNA, 22 nt, Artificial Sequence
  SAMD9L targeting guide sequence portion
uggugaccuguucucgguuuca

SEQ ID NO: 1183 - RNA, 22 nt, Artificial Sequence
  SAMD9L targeting guide sequence portion
uguggugaccuguucucgguuu

SEQ ID NO: 1184 - RNA, 22 nt, Artificial Sequence
  SAMD9L targeting guide sequence portion
uguucucgguuucauaguuuuu

SEQ ID NO: 1185 - RNA, 22 nt, Artificial Sequence
  SAMD9L targeting guide sequence portion
uucuguggugaccuguucucgg

SEQ ID NO: 1186 - RNA, 20 nt, Artificial Sequence
  SAMD9L targeting guide sequence portion
aaacuguaggagcauuacug

SEQ ID NO: 1187 - RNA, 20 nt, Artificial Sequence
  SAMD9L targeting guide sequence portion
aacuguaggagcauuacugu

SEQ ID NO: 1188 - RNA, 20 nt, Artificial Sequence
  SAMD9L targeting guide sequence portion
aaucaccuaacacaucuccu

SEQ ID NO: 1189 - RNA, 20 nt, Artificial Sequence
  SAMD9L targeting guide sequence portion
acuguaggagcauuacuguu

SEQ ID NO: 1190 - RNA, 20 nt, Artificial Sequence
  SAMD9L targeting guide sequence portion
acuguuaaucaccuaacaca

SEQ ID NO: 1191 - RNA, 20 nt, Artificial Sequence
  SAMD9L targeting guide sequence portion
agauguguuaggugauuaac

SEQ ID NO: 1192 - RNA, 20 nt, Artificial Sequence
  SAMD9L targeting guide sequence portion
agcauuacuguuaaucaccu

SEQ ID NO: 1193 - RNA, 20 nt, Artificial Sequence
  SAMD9L targeting guide sequence portion
agcuucuaggagauguguua

SEQ ID NO: 1194 - RNA, 20 nt, Artificial Sequence
  SAMD9L targeting guide sequence portion
aggagauguguuaggugauu

SEQ ID NO: 1195 - RNA, 20 nt, Artificial Sequence
  SAMD9L targeting guide sequence portion
aggagcauuacuguuaauca

SEQ ID NO: 1196 - RNA, 20 nt, Artificial Sequence
  SAMD9L targeting guide sequence portion
aggugauuaacaguaaugcu

SEQ ID NO: 1197 - RNA, 20 nt, Artificial Sequence
  SAMD9L targeting guide sequence portion
aucaccuaacacaucuccua

SEQ ID NO: 1198 - RNA, 20 nt, Artificial Sequence
  SAMD9L targeting guide sequence portion
auguguuaggugauuaacag

SEQ ID NO: 1199 - RNA, 20 nt, Artificial Sequence
  SAMD9L targeting guide sequence portion
auuacuguuaaucaccuaac

SEQ ID NO: 1200 - RNA, 20 nt, Artificial Sequence
  SAMD9L targeting guide sequence portion
caccuaacacaucuccuaga

SEQ ID NO: 1201 - RNA, 20 nt, Artificial Sequence
  SAMD9L targeting guide sequence portion
cagcuucuaggagauguguu

SEQ ID NO: 1202 - RNA, 20 nt, Artificial Sequence
  SAMD9L targeting guide sequence portion
cauuacuguuaaucaccuaa

SEQ ID NO: 1203 - RNA, 20 nt, Artificial Sequence
  SAMD9L targeting guide sequence portion
cuaggagauguguuagguga

SEQ ID NO: 1204 - RNA, 20 nt, Artificial Sequence
  SAMD9L targeting guide sequence portion
cuguaggagcauuacuguua

SEQ ID NO: 1205 - RNA, 20 nt, Artificial Sequence
  SAMD9L targeting guide sequence portion
cuguuaaucaccuaacacau

SEQ ID NO: 1206 - RNA, 20 nt, Artificial Sequence
  SAMD9L targeting guide sequence portion
cuucuaggagauguguuagg

SEQ ID NO: 1207 - RNA, 20 nt, Artificial Sequence
  SAMD9L targeting guide sequence portion
gagauguguuaggugauuaa

SEQ ID NO: 1208 - RNA, 20 nt, Artificial Sequence
  SAMD9L targeting guide sequence portion
gagcauuacuguuaaucacc

SEQ ID NO: 1209 - RNA, 20 nt, Artificial Sequence
  SAMD9L targeting guide sequence portion
gauguguuaggugauuaaca

SEQ ID NO: 1210 - RNA, 20 nt, Artificial Sequence
  SAMD9L targeting guide sequence portion
gauuaacaguaaugcuccua

SEQ ID NO: 1211 - RNA, 20 nt, Artificial Sequence
  SAMD9L targeting guide sequence portion
gcagcuucuaggagaugugu

SEQ ID NO: 1212 - RNA, 20 nt, Artificial Sequence
  SAMD9L targeting guide sequence portion
gcauuacuguuaaucaccua

SEQ ID NO: 1213 - RNA, 20 nt, Artificial Sequence
  SAMD9L targeting guide sequence portion
gcuucuaggagauguguuag

SEQ ID NO: 1214 - RNA, 20 nt, Artificial Sequence
  SAMD9L targeting guide sequence portion
ggagauguguuaggugauua

SEQ ID NO: 1215 - RNA, 20 nt, Artificial Sequence
  SAMD9L targeting guide sequence portion
ggagcauuacuguuaaucac

SEQ ID NO: 1216 - RNA, 20 nt, Artificial Sequence
  SAMD9L targeting guide sequence portion
ggugauuaacaguaaugcuc

SEQ ID NO: 1217 - RNA, 20 nt, Artificial Sequence
  SAMD9L targeting guide sequence portion
guaggagcauuacuguuaau

SEQ ID NO: 1218 - RNA, 20 nt, Artificial Sequence
  SAMD9L targeting guide sequence portion
gugauuaacaguaaugcucc

SEQ ID NO: 1219 - RNA, 20 nt, Artificial Sequence
  SAMD9L targeting guide sequence portion
guguuaggugauuaacagua

SEQ ID NO: 1220 - RNA, 20 nt, Artificial Sequence
  SAMD9L targeting guide sequence portion
guuaaucaccuaacacaucu

SEQ ID NO: 1221 - RNA, 20 nt, Artificial Sequence
  SAMD9L targeting guide sequence portion
guuaggugauuaacaguaau

SEQ ID NO: 1222 - RNA, 20 nt, Artificial Sequence
  SAMD9L targeting guide sequence portion
uaaucaccuaacacaucucc

SEQ ID NO: 1223 - RNA, 20 nt, Artificial Sequence
  SAMD9L targeting guide sequence portion
uacuguuaaucaccuaacac

SEQ ID NO: 1224 - RNA, 20 nt, Artificial Sequence
  SAMD9L targeting guide sequence portion
uaggagauguguuaggugau

SEQ ID NO: 1225 - RNA, 20 nt, Artificial Sequence
  SAMD9L targeting guide sequence portion
uaggagcauuacuguuaauc

SEQ ID NO: 1226 - RNA, 20 nt, Artificial Sequence
  SAMD9L targeting guide sequence portion
uaggugauuaacaguaaugc

SEQ ID NO: 1227 - RNA, 20 nt, Artificial Sequence
  SAMD9L targeting guide sequence portion
ucaccuaacacaucuccuag

SEQ ID NO: 1228 - RNA, 20 nt, Artificial Sequence
  SAMD9L targeting guide sequence portion
ucuaggagauguguuaggug

SEQ ID NO: 1229 - RNA, 20 nt, Artificial Sequence
  SAMD9L targeting guide sequence portion
ugauuaacaguaaugcuccu

SEQ ID NO: 1230 - RNA, 20 nt, Artificial Sequence
  SAMD9L targeting guide sequence portion
uguaggagcauuacuguuaa

SEQ ID NO: 1231 - RNA, 20 nt, Artificial Sequence
  SAMD9L targeting guide sequence portion
uguguuaggugauuaacagu

SEQ ID NO: 1232 - RNA, 20 nt, Artificial Sequence
  SAMD9L targeting guide sequence portion
uguuaaucaccuaacacauc

SEQ ID NO: 1233 - RNA, 20 nt, Artificial Sequence
  SAMD9L targeting guide sequence portion
uguuaggugauuaacaguaa

SEQ ID NO: 1234 - RNA, 20 nt, Artificial Sequence
  SAMD9L targeting guide sequence portion
uuaaucaccuaacacaucuc

SEQ ID NO: 1235 - RNA, 20 nt, Artificial Sequence
  SAMD9L targeting guide sequence portion
uuacuguuaaucaccuaaca

SEQ ID NO: 1236 - RNA, 20 nt, Artificial Sequence
  SAMD9L targeting guide sequence portion
uuaggugauuaacaguaaug

SEQ ID NO: 1237 - RNA, 20 nt, Artificial Sequence
  SAMD9L targeting guide sequence portion
uucuaggagauguguuaggu

SEQ ID NO: 1238 - RNA, 21 nt, Artificial Sequence
  SAMD9L targeting guide sequence portion
aaaacuguaggagcauuacug

SEQ ID NO: 1239 - RNA, 21 nt, Artificial Sequence
  SAMD9L targeting guide sequence portion
aaacuguaggagcauuacugu

SEQ ID NO: 1240 - RNA, 21 nt, Artificial Sequence
  SAMD9L targeting guide sequence portion
aacuguaggagcauuacuguu

SEQ ID NO: 1241 - RNA, 21 nt, Artificial Sequence
  SAMD9L targeting guide sequence portion
aaucaccuaacacaucuccua

SEQ ID NO: 1242 - RNA, 21 nt, Artificial Sequence
  SAMD9L targeting guide sequence portion
acuguaggagcauuacuguua

SEQ ID NO: 1243 - RNA, 21 nt, Artificial Sequence
  SAMD9L targeting guide sequence portion
acuguuaaucaccuaacacau

SEQ ID NO: 1244 - RNA, 21 nt, Artificial Sequence
  SAMD9L targeting guide sequence portion
agauguguuaggugauuaaca

SEQ ID NO: 1245 - RNA, 21 nt, Artificial Sequence
  SAMD9L targeting guide sequence portion
agcauuacuguuaaucaccua

SEQ ID NO: 1246 - RNA, 21 nt, Artificial Sequence
  SAMD9L targeting guide sequence portion
agcuucuaggagauguguuag

SEQ ID NO: 1247 - RNA, 21 nt, Artificial Sequence
  SAMD9L targeting guide sequence portion
aggagauguguuaggugauua

SEQ ID NO: 1248 - RNA, 21 nt, Artificial Sequence
  SAMD9L targeting guide sequence portion
aggagcauuacuguuaaucac

SEQ ID NO: 1249 - RNA, 21 nt, Artificial Sequence
  SAMD9L targeting guide sequence portion
aggugauuaacaguaaugcuc

SEQ ID NO: 1250 - RNA, 21 nt, Artificial Sequence
  SAMD9L targeting guide sequence portion
aucaccuaacacaucuccuag

SEQ ID NO: 1251 - RNA, 21 nt, Artificial Sequence
  SAMD9L targeting guide sequence portion
auguguuaggugauuaacagu

SEQ ID NO: 1252 - RNA, 21 nt, Artificial Sequence
  SAMD9L targeting guide sequence portion
auuacuguuaaucaccuaaca

SEQ ID NO: 1253 - RNA, 21 nt, Artificial Sequence
  SAMD9L targeting guide sequence portion
caccuaacacaucuccuagaa

SEQ ID NO: 1254 - RNA, 21 nt, Artificial Sequence
  SAMD9L targeting guide sequence portion
cagcuucuaggagauguguua

SEQ ID NO: 1255 - RNA, 21 nt, Artificial Sequence
  SAMD9L targeting guide sequence portion
cauuacuguuaaucaccuaac

SEQ ID NO: 1256 - RNA, 21 nt, Artificial Sequence
  SAMD9L targeting guide sequence portion
cgcagcuucuaggagaugugu

SEQ ID NO: 1257 - RNA, 21 nt, Artificial Sequence
  SAMD9L targeting guide sequence portion
cuaggagauguguuaggugau

SEQ ID NO: 1258 - RNA, 21 nt, Artificial Sequence
  SAMD9L targeting guide sequence portion
cuguaggagcauuacuguuaa

SEQ ID NO: 1259 - RNA, 21 nt, Artificial Sequence
  SAMD9L targeting guide sequence portion
cuguuaaucaccuaacacauc

SEQ ID NO: 1260 - RNA, 21 nt, Artificial Sequence
  SAMD9L targeting guide sequence portion
cuucuaggagauguguuaggu

SEQ ID NO: 1261 - RNA, 21 nt, Artificial Sequence
  SAMD9L targeting guide sequence portion
gagauguguuaggugauuaac

SEQ ID NO: 1262 - RNA, 21 nt, Artificial Sequence
  SAMD9L targeting guide sequence portion
gagcauuacuguuaaucaccu

SEQ ID NO: 1263 - RNA, 21 nt, Artificial Sequence
  SAMD9L targeting guide sequence portion
gauguguuaggugauuaacag

SEQ ID NO: 1264 - RNA, 21 nt, Artificial Sequence
  SAMD9L targeting guide sequence portion
gauuaacaguaaugcuccuac

SEQ ID NO: 1265 - RNA, 21 nt, Artificial Sequence
  SAMD9L targeting guide sequence portion
gcagcuucuaggagauguguu

SEQ ID NO: 1266 - RNA, 21 nt, Artificial Sequence
  SAMD9L targeting guide sequence portion
gcauuacuguuaaucaccuaa

SEQ ID NO: 1267 - RNA, 21 nt, Artificial Sequence
  SAMD9L targeting guide sequence portion
gcuucuaggagauguguuagg

SEQ ID NO: 1268 - RNA, 21 nt, Artificial Sequence
  SAMD9L targeting guide sequence portion
ggagauguguuaggugauuaa

SEQ ID NO: 1269 - RNA, 21 nt, Artificial Sequence
  SAMD9L targeting guide sequence portion
ggagcauuacuguuaaucacc

SEQ ID NO: 1270 - RNA, 21 nt, Artificial Sequence
  SAMD9L targeting guide sequence portion
ggugauuaacaguaaugcucc

SEQ ID NO: 1271 - RNA, 21 nt, Artificial Sequence
  SAMD9L targeting guide sequence portion
guaggagcauuacuguuaauc

SEQ ID NO: 1272 - RNA, 21 nt, Artificial Sequence
  SAMD9L targeting guide sequence portion
gugauuaacaguaaugcuccu

SEQ ID NO: 1273 - RNA, 21 nt, Artificial Sequence
  SAMD9L targeting guide sequence portion
guguuaggugauuaacaguaa

SEQ ID NO: 1274 - RNA, 21 nt, Artificial Sequence
  SAMD9L targeting guide sequence portion
guuaaucaccuaacacaucuc

SEQ ID NO: 1275 - RNA, 21 nt, Artificial Sequence
  SAMD9L targeting guide sequence portion
guuaggugauuaacaguaaug

SEQ ID NO: 1276 - RNA, 21 nt, Artificial Sequence
  SAMD9L targeting guide sequence portion
uaaucaccuaacacaucuccu

SEQ ID NO: 1277 - RNA, 21 nt, Artificial Sequence
  SAMD9L targeting guide sequence portion
uacuguuaaucaccuaacaca

SEQ ID NO: 1278 - RNA, 21 nt, Artificial Sequence
  SAMD9L targeting guide sequence portion
uaggagauguguuaggugauu

SEQ ID NO: 1279 - RNA, 21 nt, Artificial Sequence
  SAMD9L targeting guide sequence portion
uaggagcauuacuguuaauca

SEQ ID NO: 1280 - RNA, 21 nt, Artificial Sequence
  SAMD9L targeting guide sequence portion
uaggugauuaacaguaaugcu

SEQ ID NO: 1281 - RNA, 21 nt, Artificial Sequence
  SAMD9L targeting guide sequence portion
ucaccuaacacaucuccuaga

SEQ ID NO: 1282 - RNA, 21 nt, Artificial Sequence
  SAMD9L targeting guide sequence portion
ucuaggagauguguuagguga

SEQ ID NO: 1283 - RNA, 21 nt, Artificial Sequence
  SAMD9L targeting guide sequence portion
ugauuaacaguaaugcuccua

SEQ ID NO: 1284 - RNA, 21 nt, Artificial Sequence
  SAMD9L targeting guide sequence portion
uguaggagcauuacuguuaau

SEQ ID NO: 1285 - RNA, 21 nt, Artificial Sequence
  SAMD9L targeting guide sequence portion
uguguuaggugauuaacagua

SEQ ID NO: 1286 - RNA, 21 nt, Artificial Sequence
  SAMD9L targeting guide sequence portion
uguuaaucaccuaacacaucu

SEQ ID NO: 1287 - RNA, 21 nt, Artificial Sequence
  SAMD9L targeting guide sequence portion
uguuaggugauuaacaguaau

SEQ ID NO: 1288 - RNA, 21 nt, Artificial Sequence
  SAMD9L targeting guide sequence portion
uuaaucaccuaacacaucucc

SEQ ID NO: 1289 - RNA, 21 nt, Artificial Sequence
  SAMD9L targeting guide sequence portion
uuacuguuaaucaccuaacac

SEQ ID NO: 1290 - RNA, 21 nt, Artificial Sequence
  SAMD9L targeting guide sequence portion
uuaggugauuaacaguaaugc

SEQ ID NO: 1291 - RNA, 21 nt, Artificial Sequence
  SAMD9L targeting guide sequence portion
uucuaggagauguguuaggug

SEQ ID NO: 1292 - RNA, 22 nt, Artificial Sequence
  SAMD9L targeting guide sequence portion
aaaaacuguaggagcauuacug

SEQ ID NO: 1293 - RNA, 22 nt, Artificial Sequence
  SAMD9L targeting guide sequence portion
aaaacuguaggagcauuacugu

SEQ ID NO: 1294 - RNA, 22 nt, Artificial Sequence
  SAMD9L targeting guide sequence portion
aaacuguaggagcauuacuguu

SEQ ID NO: 1295 - RNA, 22 nt, Artificial Sequence
  SAMD9L targeting guide sequence portion
aacuguaggagcauuacuguua

SEQ ID NO: 1296 - RNA, 22 nt, Artificial Sequence
  SAMD9L targeting guide sequence portion
aaucaccuaacacaucuccuag

SEQ ID NO: 1297 - RNA, 22 nt, Artificial Sequence
  SAMD9L targeting guide sequence portion
acuguaggagcauuacuguuaa

SEQ ID NO: 1298 - RNA, 22 nt, Artificial Sequence
  SAMD9L targeting guide sequence portion
acuguuaaucaccuaacacauc

SEQ ID NO: 1299 - RNA, 22 nt, Artificial Sequence
  SAMD9L targeting guide sequence portion
agauguguuaggugauuaacag

SEQ ID NO: 1300 - RNA, 22 nt, Artificial Sequence
  SAMD9L targeting guide sequence portion
agcauuacuguuaaucaccuaa

SEQ ID NO: 1301 - RNA, 22 nt, Artificial Sequence
  SAMD9L targeting guide sequence portion
agcuucuaggagauguguuagg

SEQ ID NO: 1302 - RNA, 22 nt, Artificial Sequence
  SAMD9L targeting guide sequence portion
aggagauguguuaggugauuaa

SEQ ID NO: 1303 - RNA, 22 nt, Artificial Sequence
  SAMD9L targeting guide sequence portion
aggagcauuacuguuaaucacc

SEQ ID NO: 1304 - RNA, 22 nt, Artificial Sequence
  SAMD9L targeting guide sequence portion
aggugauuaacaguaaugcucc

SEQ ID NO: 1305 - RNA, 22 nt, Artificial Sequence
  SAMD9L targeting guide sequence portion
aucaccuaacacaucuccuaga

SEQ ID NO: 1306 - RNA, 22 nt, Artificial Sequence
  SAMD9L targeting guide sequence portion
auguguuaggugauuaacagua

SEQ ID NO: 1307 - RNA, 22 nt, Artificial Sequence
  SAMD9L targeting guide sequence portion
auuacuguuaaucaccuaacac

SEQ ID NO: 1308 - RNA, 22 nt, Artificial Sequence
  SAMD9L targeting guide sequence portion
caccuaacacaucuccuagaag

SEQ ID NO: 1309 - RNA, 22 nt, Artificial Sequence
  SAMD9L targeting guide sequence portion
cagcuucuaggagauguguuag

SEQ ID NO: 1310 - RNA, 22 nt, Artificial Sequence
  SAMD9L targeting guide sequence portion
cauuacuguuaaucaccuaaca

SEQ ID NO: 1311 - RNA, 22 nt, Artificial Sequence
  SAMD9L targeting guide sequence portion
ccgcagcuucuaggagaugugu

SEQ ID NO: 1312 - RNA, 22 nt, Artificial Sequence
  SAMD9L targeting guide sequence portion
cgcagcuucuaggagauguguu

SEQ ID NO: 1313 - RNA, 22 nt, Artificial Sequence
  SAMD9L targeting guide sequence portion
cuaggagauguguuaggugauu

SEQ ID NO: 1314 - RNA, 22 nt, Artificial Sequence
  SAMD9L targeting guide sequence portion
cuguaggagcauuacuguuaau

SEQ ID NO: 1315 - RNA, 22 nt, Artificial Sequence
  SAMD9L targeting guide sequence portion
cuguuaaucaccuaacacaucu

SEQ ID NO: 1316 - RNA, 22 nt, Artificial Sequence
  SAMD9L targeting guide sequence portion
cuucuaggagauguguuaggug

SEQ ID NO: 1317 - RNA, 22 nt, Artificial Sequence
  SAMD9L targeting guide sequence portion
gagauguguuaggugauuaaca

SEQ ID NO: 1318 - RNA, 22 nt, Artificial Sequence
  SAMD9L targeting guide sequence portion
gagcauuacuguuaaucaccua

SEQ ID NO: 1319 - RNA, 22 nt, Artificial Sequence
  SAMD9L targeting guide sequence portion
gauguguuaggugauuaacagu

SEQ ID NO: 1320 - RNA, 22 nt, Artificial Sequence
  SAMD9L targeting guide sequence portion
gauuaacaguaaugcuccuaca

SEQ ID NO: 1321 - RNA, 22 nt, Artificial Sequence
  SAMD9L targeting guide sequence portion
gcagcuucuaggagauguguua

SEQ ID NO: 1322 - RNA, 22 nt, Artificial Sequence
  SAMD9L targeting guide sequence portion
gcauuacuguuaaucaccuaac

SEQ ID NO: 1323 - RNA, 22 nt, Artificial Sequence
  SAMD9L targeting guide sequence portion
gcuucuaggagauguguuaggu

SEQ ID NO: 1324 - RNA, 22 nt, Artificial Sequence
  SAMD9L targeting guide sequence portion
ggagauguguuaggugauuaac

SEQ ID NO: 1325 - RNA, 22 nt, Artificial Sequence
  SAMD9L targeting guide sequence portion
ggagcauuacuguuaaucaccu

SEQ ID NO: 1326 - RNA, 22 nt, Artificial Sequence
  SAMD9L targeting guide sequence portion
ggugauuaacaguaaugcuccu

SEQ ID NO: 1327 - RNA, 22 nt, Artificial Sequence
  SAMD9L targeting guide sequence portion
guaggagcauuacuguuaauca

SEQ ID NO: 1328 - RNA, 22 nt, Artificial Sequence
  SAMD9L targeting guide sequence portion
gugauuaacaguaaugcuccua

SEQ ID NO: 1329 - RNA, 22 nt, Artificial Sequence
  SAMD9L targeting guide sequence portion
guguuaggugauuaacaguaau

SEQ ID NO: 1330 - RNA, 22 nt, Artificial Sequence
  SAMD9L targeting guide sequence portion
guuaaucaccuaacacaucucc

SEQ ID NO: 1331 - RNA, 22 nt, Artificial Sequence
  SAMD9L targeting guide sequence portion
guuaggugauuaacaguaaugc

SEQ ID NO: 1332 - RNA, 22 nt, Artificial Sequence
  SAMD9L targeting guide sequence portion
uaaucaccuaacacaucuccua

SEQ ID NO: 1333 - RNA, 22 nt, Artificial Sequence
  SAMD9L targeting guide sequence portion
uacuguuaaucaccuaacacau

SEQ ID NO: 1334 - RNA, 22 nt, Artificial Sequence
  SAMD9L targeting guide sequence portion
uaggagauguguuaggugauua

SEQ ID NO: 1335 - RNA, 22 nt, Artificial Sequence
  SAMD9L targeting guide sequence portion
uaggagcauuacuguuaaucac

SEQ ID NO: 1336 - RNA, 22 nt, Artificial Sequence
  SAMD9L targeting guide sequence portion
uaggugauuaacaguaaugcuc

SEQ ID NO: 1337 - RNA, 22 nt, Artificial Sequence
  SAMD9L targeting guide sequence portion
ucaccuaacacaucuccuagaa

SEQ ID NO: 1338 - RNA, 22 nt, Artificial Sequence
  SAMD9L targeting guide sequence portion
ucuaggagauguguuaggugau

SEQ ID NO: 1339 - RNA, 22 nt, Artificial Sequence
  SAMD9L targeting guide sequence portion
ugauuaacaguaaugcuccuac

SEQ ID NO: 1340 - RNA, 22 nt, Artificial Sequence
  SAMD9L targeting guide sequence portion
uguaggagcauuacuguuaauc

SEQ ID NO: 1341 - RNA, 22 nt, Artificial Sequence
  SAMD9L targeting guide sequence portion
uguguuaggugauuaacaguaa

SEQ ID NO: 1342 - RNA, 22 nt, Artificial Sequence
  SAMD9L targeting guide sequence portion
uguuaaucaccuaacacaucuc

SEQ ID NO: 1343 - RNA, 22 nt, Artificial Sequence
  SAMD9L targeting guide sequence portion
uguuaggugauuaacaguaaug

SEQ ID NO: 1344 - RNA, 22 nt, Artificial Sequence
  SAMD9L targeting guide sequence portion
uuaaucaccuaacacaucuccu

SEQ ID NO: 1345 - RNA, 22 nt, Artificial Sequence
  SAMD9L targeting guide sequence portion
uuacuguuaaucaccuaacaca

SEQ ID NO: 1346 - RNA, 22 nt, Artificial Sequence
  SAMD9L targeting guide sequence portion
uuaggugauuaacaguaaugcu

SEQ ID NO: 1347 - RNA, 22 nt, Artificial Sequence
  SAMD9L targeting guide sequence portion
uucuaggagauguguuagguga

SEQ ID NO: 1348 - RNA, 20 nt, Artificial Sequence
  SAMD9L targeting guide sequence portion
aaaaacuguaggggcauuac

SEQ ID NO: 1349 - RNA, 20 nt, Artificial Sequence
  SAMD9L targeting guide sequence portion
aaaacuguaggggcauuacu

SEQ ID NO: 1350 - RNA, 20 nt, Artificial Sequence
  SAMD9L targeting guide sequence portion
aaacuguaggggcauuacug

SEQ ID NO: 1351 - RNA, 20 nt, Artificial Sequence
  SAMD9L targeting guide sequence portion
aacaaaaacuguaggggcau

SEQ ID NO: 1352 - RNA, 20 nt, Artificial Sequence
  SAMD9L targeting guide sequence portion
aacaguaaugccccuacagu

SEQ ID NO: 1353 - RNA, 20 nt, Artificial Sequence
  SAMD9L targeting guide sequence portion
aacuguaggggcauuacugu

SEQ ID NO: 1354 - RNA, 20 nt, Artificial Sequence
  SAMD9L targeting guide sequence portion
aaugccccuacaguuuuugu

SEQ ID NO: 1355 - RNA, 20 nt, Artificial Sequence
  SAMD9L targeting guide sequence portion
acaaaaacuguaggggcauu

SEQ ID NO: 1356 - RNA, 20 nt, Artificial Sequence
  SAMD9L targeting guide sequence portion
acaguaaugccccuacaguu

SEQ ID NO: 1357 - RNA, 20 nt, Artificial Sequence
  SAMD9L targeting guide sequence portion
acuguaggggcauuacuguu

SEQ ID NO: 1358 - RNA, 20 nt, Artificial Sequence
  SAMD9L targeting guide sequence portion
aggggcauuacuguuaauga

SEQ ID NO: 1359 - RNA, 20 nt, Artificial Sequence
  SAMD9L targeting guide sequence portion
aggucauuaacaguaaugcc

SEQ ID NO: 1360 - RNA, 20 nt, Artificial Sequence
  SAMD9L targeting guide sequence portion
aguaaugccccuacaguuuu

SEQ ID NO: 1361 - RNA, 20 nt, Artificial Sequence
  SAMD9L targeting guide sequence portion
augccccuacaguuuuuguu

SEQ ID NO: 1362 - RNA, 20 nt, Artificial Sequence
  SAMD9L targeting guide sequence portion
augggaacaaaaacuguagg

SEQ ID NO: 1363 - RNA, 20 nt, Artificial Sequence
  SAMD9L targeting guide sequence portion
auuaacaguaaugccccuac

SEQ ID NO: 1364 - RNA, 20 nt, Artificial Sequence
  SAMD9L targeting guide sequence portion
caaaaacuguaggggcauua

SEQ ID NO: 1365 - RNA, 20 nt, Artificial Sequence
  SAMD9L targeting guide sequence portion
caguaaugccccuacaguuu

SEQ ID NO: 1366 - RNA, 20 nt, Artificial Sequence
  SAMD9L targeting guide sequence portion
cauuaacaguaaugccccua

SEQ ID NO: 1367 - RNA, 20 nt, Artificial Sequence
  SAMD9L targeting guide sequence portion
ccccuacaguuuuuguuccc

SEQ ID NO: 1368 - RNA, 20 nt, Artificial Sequence
  SAMD9L targeting guide sequence portion
cccuacaguuuuuguuccca

SEQ ID NO: 1369 - RNA, 20 nt, Artificial Sequence
  SAMD9L targeting guide sequence portion
cuguaggggcauuacuguua

SEQ ID NO: 1370 - RNA, 20 nt, Artificial Sequence
  SAMD9L targeting guide sequence portion
gaacaaaaacuguaggggca

SEQ ID NO: 1371 - RNA, 20 nt, Artificial Sequence
  SAMD9L targeting guide sequence portion
gaugggaacaaaaacuguag

SEQ ID NO: 1372 - RNA, 20 nt, Artificial Sequence
  SAMD9L targeting guide sequence portion
gccccuacaguuuuuguucc

SEQ ID NO: 1373 - RNA, 20 nt, Artificial Sequence
  SAMD9L targeting guide sequence portion
ggaacaaaaacuguaggggc

SEQ ID NO: 1374 - RNA, 20 nt, Artificial Sequence
  SAMD9L targeting guide sequence portion
ggaugggaacaaaaacugua

SEQ ID NO: 1375 - RNA, 20 nt, Artificial Sequence
  SAMD9L targeting guide sequence portion
ggcauuacuguuaaugaccu

SEQ ID NO: 1376 - RNA, 20 nt, Artificial Sequence
  SAMD9L targeting guide sequence portion
gggaacaaaaacuguagggg

SEQ ID NO: 1377 - RNA, 20 nt, Artificial Sequence
  SAMD9L targeting guide sequence portion
gggcauuacuguuaaugacc

SEQ ID NO: 1378 - RNA, 20 nt, Artificial Sequence
  SAMD9L targeting guide sequence portion
ggggcauuacuguuaaugac

SEQ ID NO: 1379 - RNA, 20 nt, Artificial Sequence
  SAMD9L targeting guide sequence portion
ggucauuaacaguaaugccc

SEQ ID NO: 1380 - RNA, 20 nt, Artificial Sequence
  SAMD9L targeting guide sequence portion
guaaugccccuacaguuuuu

SEQ ID NO: 1381 - RNA, 20 nt, Artificial Sequence
  SAMD9L targeting guide sequence portion
guaggggcauuacuguuaau

SEQ ID NO: 1382 - RNA, 20 nt, Artificial Sequence
  SAMD9L targeting guide sequence portion
gucauuaacaguaaugcccc

SEQ ID NO: 1383 - RNA, 20 nt, Artificial Sequence
  SAMD9L targeting guide sequence portion
guguuaggucauuaacagua

SEQ ID NO: 1384 - RNA, 20 nt, Artificial Sequence
  SAMD9L targeting guide sequence portion
guuaggucauuaacaguaau

SEQ ID NO: 1385 - RNA, 20 nt, Artificial Sequence
  SAMD9L targeting guide sequence portion
guuggaugggaacaaaaacu

SEQ ID NO: 1386 - RNA, 20 nt, Artificial Sequence
  SAMD9L targeting guide sequence portion
uaacaguaaugccccuacag

SEQ ID NO: 1387 - RNA, 20 nt, Artificial Sequence
  SAMD9L targeting guide sequence portion
uaaugccccuacaguuuuug

SEQ ID NO: 1388 - RNA, 20 nt, Artificial Sequence
  SAMD9L targeting guide sequence portion
uaggggcauuacuguuaaug

SEQ ID NO: 1389 - RNA, 20 nt, Artificial Sequence
  SAMD9L targeting guide sequence portion
uaggucauuaacaguaaugc

SEQ ID NO: 1390 - RNA, 20 nt, Artificial Sequence
  SAMD9L targeting guide sequence portion
ucauuaacaguaaugccccu

SEQ ID NO: 1391 - RNA, 20 nt, Artificial Sequence
  SAMD9L targeting guide sequence portion
ugccccuacaguuuuuguuc

SEQ ID NO: 1392 - RNA, 20 nt, Artificial Sequence
  SAMD9L targeting guide sequence portion
uggaugggaacaaaaacugu

SEQ ID NO: 1393 - RNA, 20 nt, Artificial Sequence
  SAMD9L targeting guide sequence portion
ugggaacaaaaacuguaggg

SEQ ID NO: 1394 - RNA, 20 nt, Artificial Sequence
  SAMD9L targeting guide sequence portion
uguaggggcauuacuguuaa

SEQ ID NO: 1395 - RNA, 20 nt, Artificial Sequence
  SAMD9L targeting guide sequence portion
uguguuaggucauuaacagu

SEQ ID NO: 1396 - RNA, 20 nt, Artificial Sequence
  SAMD9L targeting guide sequence portion
uguuaggucauuaacaguaa

SEQ ID NO: 1397 - RNA, 20 nt, Artificial Sequence
  SAMD9L targeting guide sequence portion
uuaacaguaaugccccuaca

SEQ ID NO: 1398 - RNA, 20 nt, Artificial Sequence
  SAMD9L targeting guide sequence portion
uuaggucauuaacaguaaug

SEQ ID NO: 1399 - RNA, 20 nt, Artificial Sequence
  SAMD9L targeting guide sequence portion
uuggaugggaacaaaaacug

SEQ ID NO: 1400 - RNA, 21 nt, Artificial Sequence
  SAMD9L targeting guide sequence portion
aaaaacuguaggggcauuacu

SEQ ID NO: 1401 - RNA, 21 nt, Artificial Sequence
  SAMD9L targeting guide sequence portion
aaaacuguaggggcauuacug

SEQ ID NO: 1402 - RNA, 21 nt, Artificial Sequence
  SAMD9L targeting guide sequence portion
aaacuguaggggcauuacugu

SEQ ID NO: 1403 - RNA, 21 nt, Artificial Sequence
  SAMD9L targeting guide sequence portion
aacaaaaacuguaggggcauu

SEQ ID NO: 1404 - RNA, 21 nt, Artificial Sequence
  SAMD9L targeting guide sequence portion
aacaguaaugccccuacaguu

SEQ ID NO: 1405 - RNA, 21 nt, Artificial Sequence
  SAMD9L targeting guide sequence portion
aacuguaggggcauuacuguu

SEQ ID NO: 1406 - RNA, 21 nt, Artificial Sequence
  SAMD9L targeting guide sequence portion
aaugccccuacaguuuuuguu

SEQ ID NO: 1407 - RNA, 21 nt, Artificial Sequence
  SAMD9L targeting guide sequence portion
acaaaaacuguaggggcauua

SEQ ID NO: 1408 - RNA, 21 nt, Artificial Sequence
  SAMD9L targeting guide sequence portion
acaguaaugccccuacaguuu

SEQ ID NO: 1409 - RNA, 21 nt, Artificial Sequence
  SAMD9L targeting guide sequence portion
acuguaggggcauuacuguua

SEQ ID NO: 1410 - RNA, 21 nt, Artificial Sequence
  SAMD9L targeting guide sequence portion
aggggcauuacuguuaaugac

SEQ ID NO: 1411 - RNA, 21 nt, Artificial Sequence
  SAMD9L targeting guide sequence portion
aggucauuaacaguaaugccc

SEQ ID NO: 1412 - RNA, 21 nt, Artificial Sequence
  SAMD9L targeting guide sequence portion
aguaaugccccuacaguuuuu

SEQ ID NO: 1413 - RNA, 21 nt, Artificial Sequence
  SAMD9L targeting guide sequence portion
augccccuacaguuuuuguuc

SEQ ID NO: 1414 - RNA, 21 nt, Artificial Sequence
  SAMD9L targeting guide sequence portion
augggaacaaaaacuguaggg

SEQ ID NO: 1415 - RNA, 21 nt, Artificial Sequence
  SAMD9L targeting guide sequence portion
auguguuaggucauuaacagu

SEQ ID NO: 1416 - RNA, 21 nt, Artificial Sequence
  SAMD9L targeting guide sequence portion
auuaacaguaaugccccuaca

SEQ ID NO: 1417 - RNA, 21 nt, Artificial Sequence
  SAMD9L targeting guide sequence portion
caaaaacuguaggggcauuac

SEQ ID NO: 1418 - RNA, 21 nt, Artificial Sequence
  SAMD9L targeting guide sequence portion
caguaaugccccuacaguuuu

SEQ ID NO: 1419 - RNA, 21 nt, Artificial Sequence
  SAMD9L targeting guide sequence portion
cauuaacaguaaugccccuac

SEQ ID NO: 1420 - RNA, 21 nt, Artificial Sequence
  SAMD9L targeting guide sequence portion
ccccuacaguuuuuguuccca

SEQ ID NO: 1421 - RNA, 21 nt, Artificial Sequence
  SAMD9L targeting guide sequence portion
cccuacaguuuuuguucccau

SEQ ID NO: 1422 - RNA, 21 nt, Artificial Sequence
  SAMD9L targeting guide sequence portion
cuguaggggcauuacuguuaa

SEQ ID NO: 1423 - RNA, 21 nt, Artificial Sequence
  SAMD9L targeting guide sequence portion
gaacaaaaacuguaggggcau

SEQ ID NO: 1424 - RNA, 21 nt, Artificial Sequence
  SAMD9L targeting guide sequence portion
gaugggaacaaaaacuguagg

SEQ ID NO: 1425 - RNA, 21 nt, Artificial Sequence
  SAMD9L targeting guide sequence portion
gccccuacaguuuuuguuccc

SEQ ID NO: 1426 - RNA, 21 nt, Artificial Sequence
  SAMD9L targeting guide sequence portion
ggaacaaaaacuguaggggca

SEQ ID NO: 1427 - RNA, 21 nt, Artificial Sequence
  SAMD9L targeting guide sequence portion
ggaugggaacaaaaacuguag

SEQ ID NO: 1428 - RNA, 21 nt, Artificial Sequence
  SAMD9L targeting guide sequence portion
ggcauuacuguuaaugaccua

SEQ ID NO: 1429 - RNA, 21 nt, Artificial Sequence
  SAMD9L targeting guide sequence portion
gggaacaaaaacuguaggggc

SEQ ID NO: 1430 - RNA, 21 nt, Artificial Sequence
  SAMD9L targeting guide sequence portion
gggcauuacuguuaaugaccu

SEQ ID NO: 1431 - RNA, 21 nt, Artificial Sequence
  SAMD9L targeting guide sequence portion
ggggcauuacuguuaaugacc

SEQ ID NO: 1432 - RNA, 21 nt, Artificial Sequence
  SAMD9L targeting guide sequence portion
ggucauuaacaguaaugcccc

SEQ ID NO: 1433 - RNA, 21 nt, Artificial Sequence
  SAMD9L targeting guide sequence portion
gguuggaugggaacaaaaacu

SEQ ID NO: 1434 - RNA, 21 nt, Artificial Sequence
  SAMD9L targeting guide sequence portion
guaaugccccuacaguuuuug

SEQ ID NO: 1435 - RNA, 21 nt, Artificial Sequence
  SAMD9L targeting guide sequence portion
guaggggcauuacuguuaaug

SEQ ID NO: 1436 - RNA, 21 nt, Artificial Sequence
  SAMD9L targeting guide sequence portion
gucauuaacaguaaugccccu

SEQ ID NO: 1437 - RNA, 21 nt, Artificial Sequence
  SAMD9L targeting guide sequence portion
guguuaggucauuaacaguaa

SEQ ID NO: 1438 - RNA, 21 nt, Artificial Sequence
  SAMD9L targeting guide sequence portion
guuaggucauuaacaguaaug

SEQ ID NO: 1439 - RNA, 21 nt, Artificial Sequence
  SAMD9L targeting guide sequence portion
guuggaugggaacaaaaacug

SEQ ID NO: 1440 - RNA, 21 nt, Artificial Sequence
  SAMD9L targeting guide sequence portion
uaacaguaaugccccuacagu

SEQ ID NO: 1441 - RNA, 21 nt, Artificial Sequence
  SAMD9L targeting guide sequence portion
uaaugccccuacaguuuuugu

SEQ ID NO: 1442 - RNA, 21 nt, Artificial Sequence
  SAMD9L targeting guide sequence portion
uaggggcauuacuguuaauga

SEQ ID NO: 1443 - RNA, 21 nt, Artificial Sequence
  SAMD9L targeting guide sequence portion
uaggucauuaacaguaaugcc

SEQ ID NO: 1444 - RNA, 21 nt, Artificial Sequence
  SAMD9L targeting guide sequence portion
ucauuaacaguaaugccccua

SEQ ID NO: 1445 - RNA, 21 nt, Artificial Sequence
  SAMD9L targeting guide sequence portion
ugccccuacaguuuuuguucc

SEQ ID NO: 1446 - RNA, 21 nt, Artificial Sequence
  SAMD9L targeting guide sequence portion
uggaugggaacaaaaacugua

SEQ ID NO: 1447 - RNA, 21 nt, Artificial Sequence
  SAMD9L targeting guide sequence portion
ugggaacaaaaacuguagggg

SEQ ID NO: 1448 - RNA, 21 nt, Artificial Sequence
  SAMD9L targeting guide sequence portion
uguaggggcauuacuguuaau

SEQ ID NO: 1449 - RNA, 21 nt, Artificial Sequence
  SAMD9L targeting guide sequence portion
uguguuaggucauuaacagua

SEQ ID NO: 1450 - RNA, 21 nt, Artificial Sequence
  SAMD9L targeting guide sequence portion
uguuaggucauuaacaguaau

SEQ ID NO: 1451 - RNA, 21 nt, Artificial Sequence
  SAMD9L targeting guide sequence portion
uuaacaguaaugccccuacag

SEQ ID NO: 1452 - RNA, 21 nt, Artificial Sequence
  SAMD9L targeting guide sequence portion
uuaggucauuaacaguaaugc

SEQ ID NO: 1453 - RNA, 21 nt, Artificial Sequence
  SAMD9L targeting guide sequence portion
uuggaugggaacaaaaacugu

SEQ ID NO: 1454 - RNA, 22 nt, Artificial Sequence
  SAMD9L targeting guide sequence portion
aaaaacuguaggggcauuacug

SEQ ID NO: 1455 - RNA, 22 nt, Artificial Sequence
  SAMD9L targeting guide sequence portion
aaaacuguaggggcauuacugu

SEQ ID NO: 1456 - RNA, 22 nt, Artificial Sequence
  SAMD9L targeting guide sequence portion
aaacuguaggggcauuacuguu

SEQ ID NO: 1457 - RNA, 22 nt, Artificial Sequence
  SAMD9L targeting guide sequence portion
aacaaaaacuguaggggcauua

SEQ ID NO: 1458 - RNA, 22 nt, Artificial Sequence
  SAMD9L targeting guide sequence portion
aacaguaaugccccuacaguuu

SEQ ID NO: 1459 - RNA, 22 nt, Artificial Sequence
  SAMD9L targeting guide sequence portion
aacuguaggggcauuacuguua

SEQ ID NO: 1460 - RNA, 22 nt, Artificial Sequence
  SAMD9L targeting guide sequence portion
aaugccccuacaguuuuuguuc

SEQ ID NO: 1461 - RNA, 22 nt, Artificial Sequence
  SAMD9L targeting guide sequence portion
acaaaaacuguaggggcauuac

SEQ ID NO: 1462 - RNA, 22 nt, Artificial Sequence
  SAMD9L targeting guide sequence portion
acaguaaugccccuacaguuuu

SEQ ID NO: 1463 - RNA, 22 nt, Artificial Sequence
  SAMD9L targeting guide sequence portion
acuguaggggcauuacuguuaa

SEQ ID NO: 1464 - RNA, 22 nt, Artificial Sequence
  SAMD9L targeting guide sequence portion
aggggcauuacuguuaaugacc

SEQ ID NO: 1465 - RNA, 22 nt, Artificial Sequence
  SAMD9L targeting guide sequence portion
aggucauuaacaguaaugcccc

SEQ ID NO: 1466 - RNA, 22 nt, Artificial Sequence
  SAMD9L targeting guide sequence portion
aguaaugccccuacaguuuuug

SEQ ID NO: 1467 - RNA, 22 nt, Artificial Sequence
  SAMD9L targeting guide sequence portion
augccccuacaguuuuuguucc

SEQ ID NO: 1468 - RNA, 22 nt, Artificial Sequence
  SAMD9L targeting guide sequence portion
augggaacaaaaacuguagggg

SEQ ID NO: 1469 - RNA, 22 nt, Artificial Sequence
  SAMD9L targeting guide sequence portion
auguguuaggucauuaacagua

SEQ ID NO: 1470 - RNA, 22 nt, Artificial Sequence
  SAMD9L targeting guide sequence portion
auuaacaguaaugccccuacag

SEQ ID NO: 1471 - RNA, 22 nt, Artificial Sequence
  SAMD9L targeting guide sequence portion
caaaaacuguaggggcauuacu

SEQ ID NO: 1472 - RNA, 22 nt, Artificial Sequence
  SAMD9L targeting guide sequence portion
caguaaugccccuacaguuuuu

SEQ ID NO: 1473 - RNA, 22 nt, Artificial Sequence
  SAMD9L targeting guide sequence portion
cauuaacaguaaugccccuaca

SEQ ID NO: 1474 - RNA, 22 nt, Artificial Sequence
  SAMD9L targeting guide sequence portion
ccccuacaguuuuuguucccau

SEQ ID NO: 1475 - RNA, 22 nt, Artificial Sequence
  SAMD9L targeting guide sequence portion
cccuacaguuuuuguucccauc

SEQ ID NO: 1476 - RNA, 22 nt, Artificial Sequence
  SAMD9L targeting guide sequence portion
cuguaggggcauuacuguuaau

SEQ ID NO: 1477 - RNA, 22 nt, Artificial Sequence
  SAMD9L targeting guide sequence portion
gaacaaaaacuguaggggcauu

SEQ ID NO: 1478 - RNA, 22 nt, Artificial Sequence
  SAMD9L targeting guide sequence portion
gaugggaacaaaaacuguaggg

SEQ ID NO: 1479 - RNA, 22 nt, Artificial Sequence
  SAMD9L targeting guide sequence portion
gauguguuaggucauuaacagu

SEQ ID NO: 1480 - RNA, 22 nt, Artificial Sequence
  SAMD9L targeting guide sequence portion
gccccuacaguuuuuguuccca

SEQ ID NO: 1481 - RNA, 22 nt, Artificial Sequence
  SAMD9L targeting guide sequence portion
ggaacaaaaacuguaggggcau

SEQ ID NO: 1482 - RNA, 22 nt, Artificial Sequence
  SAMD9L targeting guide sequence portion
ggaugggaacaaaaacuguagg

SEQ ID NO: 1483 - RNA, 22 nt, Artificial Sequence
  SAMD9L targeting guide sequence portion
ggcauuacuguuaaugaccuaa

SEQ ID NO: 1484 - RNA, 22 nt, Artificial Sequence
  SAMD9L targeting guide sequence portion
gggaacaaaaacuguaggggca

SEQ ID NO: 1485 - RNA, 22 nt, Artificial Sequence
  SAMD9L targeting guide sequence portion
gggcauuacuguuaaugaccua

SEQ ID NO: 1486 - RNA, 22 nt, Artificial Sequence
  SAMD9L targeting guide sequence portion
ggggcauuacuguuaaugaccu

SEQ ID NO: 1487 - RNA, 22 nt, Artificial Sequence
  SAMD9L targeting guide sequence portion
ggucauuaacaguaaugccccu

SEQ ID NO: 1488 - RNA, 22 nt, Artificial Sequence
  SAMD9L targeting guide sequence portion
gguuggaugggaacaaaaacug

SEQ ID NO: 1489 - RNA, 22 nt, Artificial Sequence
  SAMD9L targeting guide sequence portion
guaaugccccuacaguuuuugu

SEQ ID NO: 1490 - RNA, 22 nt, Artificial Sequence
  SAMD9L targeting guide sequence portion
guaggggcauuacuguuaauga

SEQ ID NO: 1491 - RNA, 22 nt, Artificial Sequence
  SAMD9L targeting guide sequence portion
gucauuaacaguaaugccccua

SEQ ID NO: 1492 - RNA, 22 nt, Artificial Sequence
  SAMD9L targeting guide sequence portion
guguuaggucauuaacaguaau

SEQ ID NO: 1493 - RNA, 22 nt, Artificial Sequence
  SAMD9L targeting guide sequence portion
guuaggucauuaacaguaaugc

SEQ ID NO: 1494 - RNA, 22 nt, Artificial Sequence
  SAMD9L targeting guide sequence portion
guuggaugggaacaaaaacugu

SEQ ID NO: 1495 - RNA, 22 nt, Artificial Sequence
  SAMD9L targeting guide sequence portion
uaacaguaaugccccuacaguu

SEQ ID NO: 1496 - RNA, 22 nt, Artificial Sequence
  SAMD9L targeting guide sequence portion
uaaugccccuacaguuuuuguu

SEQ ID NO: 1497 - RNA, 22 nt, Artificial Sequence
  SAMD9L targeting guide sequence portion
uaggggcauuacuguuaaugac

SEQ ID NO: 1498 - RNA, 22 nt, Artificial Sequence
  SAMD9L targeting guide sequence portion
uaggucauuaacaguaaugccc

SEQ ID NO: 1499 - RNA, 22 nt, Artificial Sequence
  SAMD9L targeting guide sequence portion
ucauuaacaguaaugccccuac

SEQ ID NO: 1500 - RNA, 22 nt, Artificial Sequence
  SAMD9L targeting guide sequence portion
ugccccuacaguuuuuguuccc

SEQ ID NO: 1501 - RNA, 22 nt, Artificial Sequence
  SAMD9L targeting guide sequence portion
uggaugggaacaaaaacuguag

SEQ ID NO: 1502 - RNA, 22 nt, Artificial Sequence
  SAMD9L targeting guide sequence portion
ugggaacaaaaacuguaggggc

SEQ ID NO: 1503 - RNA, 22 nt, Artificial Sequence
  SAMD9L targeting guide sequence portion
ugguuggaugggaacaaaaacu

SEQ ID NO: 1504 - RNA, 22 nt, Artificial Sequence
  SAMD9L targeting guide sequence portion
uguaggggcauuacuguuaaug

SEQ ID NO: 1505 - RNA, 22 nt, Artificial Sequence
  SAMD9L targeting guide sequence portion
uguguuaggucauuaacaguaa

SEQ ID NO: 1506 - RNA, 22 nt, Artificial Sequence
  SAMD9L targeting guide sequence portion
uguuaggucauuaacaguaaug

SEQ ID NO: 1507 - RNA, 22 nt, Artificial Sequence
  SAMD9L targeting guide sequence portion
uuaacaguaaugccccuacagu

SEQ ID NO: 1508 - RNA, 22 nt, Artificial Sequence
  SAMD9L targeting guide sequence portion
uuaggucauuaacaguaaugcc

SEQ ID NO: 1509 - RNA, 22 nt, Artificial Sequence
  SAMD9L targeting guide sequence portion
uuggaugggaacaaaaacugua

SEQ ID NO: 1510 - RNA, 20 nt, Artificial Sequence
  SAMD9L targeting guide sequence portion
aaaaauuccuguauuucaga

SEQ ID NO: 1511 - RNA, 20 nt, Artificial Sequence
  SAMD9L targeting guide sequence portion
aaaaugaaagcaccuaaaaa

SEQ ID NO: 1512 - RNA, 20 nt, Artificial Sequence
  SAMD9L targeting guide sequence portion
aaaauuccuguauuucagau

SEQ ID NO: 1513 - RNA, 20 nt, Artificial Sequence
  SAMD9L targeting guide sequence portion
aaagcaccuaaaaauuccug

SEQ ID NO: 1514 - RNA, 20 nt, Artificial Sequence
  SAMD9L targeting guide sequence portion
aaauacaggaauuuuuaggu

SEQ ID NO: 1515 - RNA, 20 nt, Artificial Sequence
  SAMD9L targeting guide sequence portion
aaaugaaagcaccuaaaaau

SEQ ID NO: 1516 - RNA, 20 nt, Artificial Sequence
  SAMD9L targeting guide sequence portion
aaauuccuguauuucagaua

SEQ ID NO: 1517 - RNA, 20 nt, Artificial Sequence
  SAMD9L targeting guide sequence portion
aagcaccuaaaaauuccugu

SEQ ID NO: 1518 - RNA, 20 nt, Artificial Sequence
  SAMD9L targeting guide sequence portion
aauacaggaauuuuuaggug

SEQ ID NO: 1519 - RNA, 20 nt, Artificial Sequence
  SAMD9L targeting guide sequence portion
aaugaaagcaccuaaaaauu

SEQ ID NO: 1520 - RNA, 20 nt, Artificial Sequence
  SAMD9L targeting guide sequence portion
aauuccuguauuucagauac

SEQ ID NO: 1521 - RNA, 20 nt, Artificial Sequence
  SAMD9L targeting guide sequence portion
acaggaauuuuuaggugcuu

SEQ ID NO: 1522 - RNA, 20 nt, Artificial Sequence
  SAMD9L targeting guide sequence portion
accuaaaaauuccuguauuu

SEQ ID NO: 1523 - RNA, 20 nt, Artificial Sequence
  SAMD9L targeting guide sequence portion
accuaguguaucugaaauac

SEQ ID NO: 1524 - RNA, 20 nt, Artificial Sequence
  SAMD9L targeting guide sequence portion
acuugaccuaguguaucuga

SEQ ID NO: 1525 - RNA, 20 nt, Artificial Sequence
  SAMD9L targeting guide sequence portion
agcaccuaaaaauuccugua

SEQ ID NO: 1526 - RNA, 20 nt, Artificial Sequence
  SAMD9L targeting guide sequence portion
aguguaucugaaauacagga

SEQ ID NO: 1527 - RNA, 20 nt, Artificial Sequence
  SAMD9L targeting guide sequence portion
auacaggaauuuuuaggugc

SEQ ID NO: 1528 - RNA, 20 nt, Artificial Sequence
  SAMD9L targeting guide sequence portion
aucugaaauacaggaauuuu

SEQ ID NO: 1529 - RNA, 20 nt, Artificial Sequence
  SAMD9L targeting guide sequence portion
augaaagcaccuaaaaauuc

SEQ ID NO: 1530 - RNA, 20 nt, Artificial Sequence
  SAMD9L targeting guide sequence portion
auuccuguauuucagauaca

SEQ ID NO: 1531 - RNA, 20 nt, Artificial Sequence
  SAMD9L targeting guide sequence portion
caccuaaaaauuccuguauu

SEQ ID NO: 1532 - RNA, 20 nt, Artificial Sequence
  SAMD9L targeting guide sequence portion
caggaauuuuuaggugcuuu

SEQ ID NO: 1533 - RNA, 20 nt, Artificial Sequence
  SAMD9L targeting guide sequence portion
ccuaaaaauuccuguauuuc

SEQ ID NO: 1534 - RNA, 20 nt, Artificial Sequence
  SAMD9L targeting guide sequence portion
ccuaguguaucugaaauaca

SEQ ID NO: 1535 - RNA, 20 nt, Artificial Sequence
  SAMD9L targeting guide sequence portion
ccuguauuucagauacacua

SEQ ID NO: 1536 - RNA, 20 nt, Artificial Sequence
  SAMD9L targeting guide sequence portion
cuaaaaauuccuguauuuca

SEQ ID NO: 1537 - RNA, 20 nt, Artificial Sequence
  SAMD9L targeting guide sequence portion
cuaguguaucugaaauacag

SEQ ID NO: 1538 - RNA, 20 nt, Artificial Sequence
  SAMD9L targeting guide sequence portion
cugaaauacaggaauuuuua

SEQ ID NO: 1539 - RNA, 20 nt, Artificial Sequence
  SAMD9L targeting guide sequence portion
cuguauuucagauacacuag

SEQ ID NO: 1540 - RNA, 20 nt, Artificial Sequence
  SAMD9L targeting guide sequence portion
cuugaccuaguguaucugaa

SEQ ID NO: 1541 - RNA, 20 nt, Artificial Sequence
  SAMD9L targeting guide sequence portion
gaaagcaccuaaaaauuccu

SEQ ID NO: 1542 - RNA, 20 nt, Artificial Sequence
  SAMD9L targeting guide sequence portion
gaaauacaggaauuuuuagg

SEQ ID NO: 1543 - RNA, 20 nt, Artificial Sequence
  SAMD9L targeting guide sequence portion
gaccuaguguaucugaaaua

SEQ ID NO: 1544 - RNA, 20 nt, Artificial Sequence
  SAMD9L targeting guide sequence portion
gacuugaccuaguguaucug

SEQ ID NO: 1545 - RNA, 20 nt, Artificial Sequence
  SAMD9L targeting guide sequence portion
gcaccuaaaaauuccuguau

SEQ ID NO: 1546 - RNA, 20 nt, Artificial Sequence
  SAMD9L targeting guide sequence portion
guaucugaaauacaggaauu

SEQ ID NO: 1547 - RNA, 20 nt, Artificial Sequence
  SAMD9L targeting guide sequence portion
guauuucagauacacuaggu

SEQ ID NO: 1548 - RNA, 20 nt, Artificial Sequence
  SAMD9L targeting guide sequence portion
guguaucugaaauacaggaa

SEQ ID NO: 1549 - RNA, 20 nt, Artificial Sequence
  SAMD9L targeting guide sequence portion
uaaaaauuccuguauuucag

SEQ ID NO: 1550 - RNA, 20 nt, Artificial Sequence
  SAMD9L targeting guide sequence portion
uacaggaauuuuuaggugcu

SEQ ID NO: 1551 - RNA, 20 nt, Artificial Sequence
  SAMD9L targeting guide sequence portion
uaguguaucugaaauacagg

SEQ ID NO: 1552 - RNA, 20 nt, Artificial Sequence
  SAMD9L targeting guide sequence portion
uaucugaaauacaggaauuu

SEQ ID NO: 1553 - RNA, 20 nt, Artificial Sequence
  SAMD9L targeting guide sequence portion
uccuguauuucagauacacu

SEQ ID NO: 1554 - RNA, 20 nt, Artificial Sequence
  SAMD9L targeting guide sequence portion
ucugaaauacaggaauuuuu

SEQ ID NO: 1555 - RNA, 20 nt, Artificial Sequence
  SAMD9L targeting guide sequence portion
ugaaagcaccuaaaaauucc

SEQ ID NO: 1556 - RNA, 20 nt, Artificial Sequence
  SAMD9L targeting guide sequence portion
ugaaauacaggaauuuuuag

SEQ ID NO: 1557 - RNA, 20 nt, Artificial Sequence
  SAMD9L targeting guide sequence portion
ugaccuaguguaucugaaau

SEQ ID NO: 1558 - RNA, 20 nt, Artificial Sequence
  SAMD9L targeting guide sequence portion
uguaucugaaauacaggaau

SEQ ID NO: 1559 - RNA, 20 nt, Artificial Sequence
  SAMD9L targeting guide sequence portion
uguauuucagauacacuagg

SEQ ID NO: 1560 - RNA, 20 nt, Artificial Sequence
  SAMD9L targeting guide sequence portion
uuccuguauuucagauacac

SEQ ID NO: 1561 - RNA, 20 nt, Artificial Sequence
  SAMD9L targeting guide sequence portion
uugaccuaguguaucugaaa

SEQ ID NO: 1562 - RNA, 21 nt, Artificial Sequence
  SAMD9L targeting guide sequence portion
aaaaauuccuguauuucagau

SEQ ID NO: 1563 - RNA, 21 nt, Artificial Sequence
  SAMD9L targeting guide sequence portion
aaaaugaaagcaccuaaaaau

SEQ ID NO: 1564 - RNA, 21 nt, Artificial Sequence
  SAMD9L targeting guide sequence portion
aaaauuccuguauuucagaua

SEQ ID NO: 1565 - RNA, 21 nt, Artificial Sequence
  SAMD9L targeting guide sequence portion
aaagcaccuaaaaauuccugu

SEQ ID NO: 1566 - RNA, 21 nt, Artificial Sequence
  SAMD9L targeting guide sequence portion
aaauacaggaauuuuuaggug

SEQ ID NO: 1567 - RNA, 21 nt, Artificial Sequence
  SAMD9L targeting guide sequence portion
aaaugaaagcaccuaaaaauu

SEQ ID NO: 1568 - RNA, 21 nt, Artificial Sequence
  SAMD9L targeting guide sequence portion
aaauuccuguauuucagauac

SEQ ID NO: 1569 - RNA, 21 nt, Artificial Sequence
  SAMD9L targeting guide sequence portion
aagcaccuaaaaauuccugua

SEQ ID NO: 1570 - RNA, 21 nt, Artificial Sequence
  SAMD9L targeting guide sequence portion
aauacaggaauuuuuaggugc

SEQ ID NO: 1571 - RNA, 21 nt, Artificial Sequence
  SAMD9L targeting guide sequence portion
aaugaaagcaccuaaaaauuc

SEQ ID NO: 1572 - RNA, 21 nt, Artificial Sequence
  SAMD9L targeting guide sequence portion
aauuccuguauuucagauaca

SEQ ID NO: 1573 - RNA, 21 nt, Artificial Sequence
  SAMD9L targeting guide sequence portion
acaggaauuuuuaggugcuuu

SEQ ID NO: 1574 - RNA, 21 nt, Artificial Sequence
  SAMD9L targeting guide sequence portion
accuaaaaauuccuguauuuc

SEQ ID NO: 1575 - RNA, 21 nt, Artificial Sequence
  SAMD9L targeting guide sequence portion
accuaguguaucugaaauaca

SEQ ID NO: 1576 - RNA, 21 nt, Artificial Sequence
  SAMD9L targeting guide sequence portion
acuugaccuaguguaucugaa

SEQ ID NO: 1577 - RNA, 21 nt, Artificial Sequence
  SAMD9L targeting guide sequence portion
agacuugaccuaguguaucug

SEQ ID NO: 1578 - RNA, 21 nt, Artificial Sequence
  SAMD9L targeting guide sequence portion
agcaccuaaaaauuccuguau

SEQ ID NO: 1579 - RNA, 21 nt, Artificial Sequence
  SAMD9L targeting guide sequence portion
aguguaucugaaauacaggaa

SEQ ID NO: 1580 - RNA, 21 nt, Artificial Sequence
  SAMD9L targeting guide sequence portion
auacaggaauuuuuaggugcu

SEQ ID NO: 1581 - RNA, 21 nt, Artificial Sequence
  SAMD9L targeting guide sequence portion
aucugaaauacaggaauuuuu

SEQ ID NO: 1582 - RNA, 21 nt, Artificial Sequence
  SAMD9L targeting guide sequence portion
augaaagcaccuaaaaauucc

SEQ ID NO: 1583 - RNA, 21 nt, Artificial Sequence
  SAMD9L targeting guide sequence portion
auuccuguauuucagauacac

SEQ ID NO: 1584 - RNA, 21 nt, Artificial Sequence
  SAMD9L targeting guide sequence portion
caaaaugaaagcaccuaaaaa

SEQ ID NO: 1585 - RNA, 21 nt, Artificial Sequence
  SAMD9L targeting guide sequence portion
caccuaaaaauuccuguauuu

SEQ ID NO: 1586 - RNA, 21 nt, Artificial Sequence
  SAMD9L targeting guide sequence portion
caggaauuuuuaggugcuuuc

SEQ ID NO: 1587 - RNA, 21 nt, Artificial Sequence
  SAMD9L targeting guide sequence portion
ccuaaaaauuccuguauuuca

SEQ ID NO: 1588 - RNA, 21 nt, Artificial Sequence
  SAMD9L targeting guide sequence portion
ccuaguguaucugaaauacag

SEQ ID NO: 1589 - RNA, 21 nt, Artificial Sequence
  SAMD9L targeting guide sequence portion
ccuguauuucagauacacuag

SEQ ID NO: 1590 - RNA, 21 nt, Artificial Sequence
  SAMD9L targeting guide sequence portion
cuaaaaauuccuguauuucag

SEQ ID NO: 1591 - RNA, 21 nt, Artificial Sequence
  SAMD9L targeting guide sequence portion
cuaguguaucugaaauacagg

SEQ ID NO: 1592 - RNA, 21 nt, Artificial Sequence
  SAMD9L targeting guide sequence portion
cugaaauacaggaauuuuuag

SEQ ID NO: 1593 - RNA, 21 nt, Artificial Sequence
  SAMD9L targeting guide sequence portion
cuguauuucagauacacuagg

SEQ ID NO: 1594 - RNA, 21 nt, Artificial Sequence
  SAMD9L targeting guide sequence portion
cuugaccuaguguaucugaaa

SEQ ID NO: 1595 - RNA, 21 nt, Artificial Sequence
  SAMD9L targeting guide sequence portion
gaaagcaccuaaaaauuccug

SEQ ID NO: 1596 - RNA, 21 nt, Artificial Sequence
  SAMD9L targeting guide sequence portion
gaaauacaggaauuuuuaggu

SEQ ID NO: 1597 - RNA, 21 nt, Artificial Sequence
  SAMD9L targeting guide sequence portion
gaccuaguguaucugaaauac

SEQ ID NO: 1598 - RNA, 21 nt, Artificial Sequence
  SAMD9L targeting guide sequence portion
gacuugaccuaguguaucuga

SEQ ID NO: 1599 - RNA, 21 nt, Artificial Sequence
  SAMD9L targeting guide sequence portion
gcaccuaaaaauuccuguauu

SEQ ID NO: 1600 - RNA, 21 nt, Artificial Sequence
  SAMD9L targeting guide sequence portion
guaucugaaauacaggaauuu

SEQ ID NO: 1601 - RNA, 21 nt, Artificial Sequence
  SAMD9L targeting guide sequence portion
guauuucagauacacuagguc

SEQ ID NO: 1602 - RNA, 21 nt, Artificial Sequence
  SAMD9L targeting guide sequence portion
guguaucugaaauacaggaau

SEQ ID NO: 1603 - RNA, 21 nt, Artificial Sequence
  SAMD9L targeting guide sequence portion
uaaaaauuccuguauuucaga

SEQ ID NO: 1604 - RNA, 21 nt, Artificial Sequence
  SAMD9L targeting guide sequence portion
uacaggaauuuuuaggugcuu

SEQ ID NO: 1605 - RNA, 21 nt, Artificial Sequence
  SAMD9L targeting guide sequence portion
uaguguaucugaaauacagga

SEQ ID NO: 1606 - RNA, 21 nt, Artificial Sequence
  SAMD9L targeting guide sequence portion
uaucugaaauacaggaauuuu

SEQ ID NO: 1607 - RNA, 21 nt, Artificial Sequence
  SAMD9L targeting guide sequence portion
uccuguauuucagauacacua

SEQ ID NO: 1608 - RNA, 21 nt, Artificial Sequence
  SAMD9L targeting guide sequence portion
ucugaaauacaggaauuuuua

SEQ ID NO: 1609 - RNA, 21 nt, Artificial Sequence
  SAMD9L targeting guide sequence portion
ugaaagcaccuaaaaauuccu

SEQ ID NO: 1610 - RNA, 21 nt, Artificial Sequence
  SAMD9L targeting guide sequence portion
ugaaauacaggaauuuuuagg

SEQ ID NO: 1611 - RNA, 21 nt, Artificial Sequence
  SAMD9L targeting guide sequence portion
ugaccuaguguaucugaaaua

SEQ ID NO: 1612 - RNA, 21 nt, Artificial Sequence
  SAMD9L targeting guide sequence portion
uguaucugaaauacaggaauu

SEQ ID NO: 1613 - RNA, 21 nt, Artificial Sequence
  SAMD9L targeting guide sequence portion
uguauuucagauacacuaggu

SEQ ID NO: 1614 - RNA, 21 nt, Artificial Sequence
  SAMD9L targeting guide sequence portion
uuccuguauuucagauacacu

SEQ ID NO: 1615 - RNA, 21 nt, Artificial Sequence
  SAMD9L targeting guide sequence portion
uugaccuaguguaucugaaau

SEQ ID NO: 1616 - RNA, 22 nt, Artificial Sequence
  SAMD9L targeting guide sequence portion
aaaaauuccuguauuucagaua

SEQ ID NO: 1617 - RNA, 22 nt, Artificial Sequence
  SAMD9L targeting guide sequence portion
aaaaugaaagcaccuaaaaauu

SEQ ID NO: 1618 - RNA, 22 nt, Artificial Sequence
  SAMD9L targeting guide sequence portion
aaaauuccuguauuucagauac

SEQ ID NO: 1619 - RNA, 22 nt, Artificial Sequence
  SAMD9L targeting guide sequence portion
aaagcaccuaaaaauuccugua

SEQ ID NO: 1620 - RNA, 22 nt, Artificial Sequence
  SAMD9L targeting guide sequence portion
aaauacaggaauuuuuaggugc

SEQ ID NO: 1621 - RNA, 22 nt, Artificial Sequence
  SAMD9L targeting guide sequence portion
aaaugaaagcaccuaaaaauuc

SEQ ID NO: 1622 - RNA, 22 nt, Artificial Sequence
  SAMD9L targeting guide sequence portion
aaauuccuguauuucagauaca

SEQ ID NO: 1623 - RNA, 22 nt, Artificial Sequence
  SAMD9L targeting guide sequence portion
aagcaccuaaaaauuccuguau

SEQ ID NO: 1624 - RNA, 22 nt, Artificial Sequence
  SAMD9L targeting guide sequence portion
aauacaggaauuuuuaggugcu

SEQ ID NO: 1625 - RNA, 22 nt, Artificial Sequence
  SAMD9L targeting guide sequence portion
aaugaaagcaccuaaaaauucc

SEQ ID NO: 1626 - RNA, 22 nt, Artificial Sequence
  SAMD9L targeting guide sequence portion
aauuccuguauuucagauacac

SEQ ID NO: 1627 - RNA, 22 nt, Artificial Sequence
  SAMD9L targeting guide sequence portion
acaggaauuuuuaggugcuuuc

SEQ ID NO: 1628 - RNA, 22 nt, Artificial Sequence
  SAMD9L targeting guide sequence portion
accuaaaaauuccuguauuuca

SEQ ID NO: 1629 - RNA, 22 nt, Artificial Sequence
  SAMD9L targeting guide sequence portion
accuaguguaucugaaauacag

SEQ ID NO: 1630 - RNA, 22 nt, Artificial Sequence
  SAMD9L targeting guide sequence portion
acuugaccuaguguaucugaaa

SEQ ID NO: 1631 - RNA, 22 nt, Artificial Sequence
  SAMD9L targeting guide sequence portion
agacuugaccuaguguaucuga

SEQ ID NO: 1632 - RNA, 22 nt, Artificial Sequence
  SAMD9L targeting guide sequence portion
agcaccuaaaaauuccuguauu

SEQ ID NO: 1633 - RNA, 22 nt, Artificial Sequence
  SAMD9L targeting guide sequence portion
aguguaucugaaauacaggaau

SEQ ID NO: 1634 - RNA, 22 nt, Artificial Sequence
  SAMD9L targeting guide sequence portion
auacaggaauuuuuaggugcuu

SEQ ID NO: 1635 - RNA, 22 nt, Artificial Sequence
  SAMD9L targeting guide sequence portion
aucugaaauacaggaauuuuua

SEQ ID NO: 1636 - RNA, 22 nt, Artificial Sequence
  SAMD9L targeting guide sequence portion
augaaagcaccuaaaaauuccu

SEQ ID NO: 1637 - RNA, 22 nt, Artificial Sequence
  SAMD9L targeting guide sequence portion
auuccuguauuucagauacacu

SEQ ID NO: 1638 - RNA, 22 nt, Artificial Sequence
  SAMD9L targeting guide sequence portion
caaaaugaaagcaccuaaaaau

SEQ ID NO: 1639 - RNA, 22 nt, Artificial Sequence
  SAMD9L targeting guide sequence portion
caccuaaaaauuccuguauuuc

SEQ ID NO: 1640 - RNA, 22 nt, Artificial Sequence
  SAMD9L targeting guide sequence portion
caggaauuuuuaggugcuuuca

SEQ ID NO: 1641 - RNA, 22 nt, Artificial Sequence
  SAMD9L targeting guide sequence portion
ccaaaaugaaagcaccuaaaaa

SEQ ID NO: 1642 - RNA, 22 nt, Artificial Sequence
  SAMD9L targeting guide sequence portion
ccuaaaaauuccuguauuucag

SEQ ID NO: 1643 - RNA, 22 nt, Artificial Sequence
  SAMD9L targeting guide sequence portion
ccuaguguaucugaaauacagg

SEQ ID NO: 1644 - RNA, 22 nt, Artificial Sequence
  SAMD9L targeting guide sequence portion
ccuguauuucagauacacuagg

SEQ ID NO: 1645 - RNA, 22 nt, Artificial Sequence
  SAMD9L targeting guide sequence portion
cuaaaaauuccuguauuucaga

SEQ ID NO: 1646 - RNA, 22 nt, Artificial Sequence
  SAMD9L targeting guide sequence portion
cuaguguaucugaaauacagga

SEQ ID NO: 1647 - RNA, 22 nt, Artificial Sequence
  SAMD9L targeting guide sequence portion
cugaaauacaggaauuuuuagg

SEQ ID NO: 1648 - RNA, 22 nt, Artificial Sequence
  SAMD9L targeting guide sequence portion
cuguauuucagauacacuaggu

SEQ ID NO: 1649 - RNA, 22 nt, Artificial Sequence
  SAMD9L targeting guide sequence portion
cuugaccuaguguaucugaaau

SEQ ID NO: 1650 - RNA, 22 nt, Artificial Sequence
  SAMD9L targeting guide sequence portion
gaaagcaccuaaaaauuccugu

SEQ ID NO: 1651 - RNA, 22 nt, Artificial Sequence
  SAMD9L targeting guide sequence portion
gaaauacaggaauuuuuaggug

SEQ ID NO: 1652 - RNA, 22 nt, Artificial Sequence
  SAMD9L targeting guide sequence portion
gaccuaguguaucugaaauaca

SEQ ID NO: 1653 - RNA, 22 nt, Artificial Sequence
  SAMD9L targeting guide sequence portion
gacuugaccuaguguaucugaa

SEQ ID NO: 1654 - RNA, 22 nt, Artificial Sequence
  SAMD9L targeting guide sequence portion
gcaccuaaaaauuccuguauuu

SEQ ID NO: 1655 - RNA, 22 nt, Artificial Sequence
  SAMD9L targeting guide sequence portion
guaucugaaauacaggaauuuu

SEQ ID NO: 1656 - RNA, 22 nt, Artificial Sequence
  SAMD9L targeting guide sequence portion
guauuucagauacacuagguca

SEQ ID NO: 1657 - RNA, 22 nt, Artificial Sequence
  SAMD9L targeting guide sequence portion
guguaucugaaauacaggaauu

SEQ ID NO: 1658 - RNA, 22 nt, Artificial Sequence
  SAMD9L targeting guide sequence portion
uaaaaauuccuguauuucagau

SEQ ID NO: 1659 - RNA, 22 nt, Artificial Sequence
  SAMD9L targeting guide sequence portion
uacaggaauuuuuaggugcuuu

SEQ ID NO: 1660 - RNA, 22 nt, Artificial Sequence
  SAMD9L targeting guide sequence portion
uagacuugaccuaguguaucug

SEQ ID NO: 1661 - RNA, 22 nt, Artificial Sequence
  SAMD9L targeting guide sequence portion
uaguguaucugaaauacaggaa

SEQ ID NO: 1662 - RNA, 22 nt, Artificial Sequence
  SAMD9L targeting guide sequence portion
uaucugaaauacaggaauuuuu

SEQ ID NO: 1663 - RNA, 22 nt, Artificial Sequence
  SAMD9L targeting guide sequence portion
uccuguauuucagauacacuag

SEQ ID NO: 1664 - RNA, 22 nt, Artificial Sequence
  SAMD9L targeting guide sequence portion
ucugaaauacaggaauuuuuag

SEQ ID NO: 1665 - RNA, 22 nt, Artificial Sequence
  SAMD9L targeting guide sequence portion
ugaaagcaccuaaaaauuccug

SEQ ID NO: 1666 - RNA, 22 nt, Artificial Sequence
  SAMD9L targeting guide sequence portion
ugaaauacaggaauuuuuaggu

SEQ ID NO: 1667 - RNA, 22 nt, Artificial Sequence
  SAMD9L targeting guide sequence portion
ugaccuaguguaucugaaauac

SEQ ID NO: 1668 - RNA, 22 nt, Artificial Sequence
  SAMD9L targeting guide sequence portion
uguaucugaaauacaggaauuu

SEQ ID NO: 1669 - RNA, 22 nt, Artificial Sequence
  SAMD9L targeting guide sequence portion
uguauuucagauacacuagguc

SEQ ID NO: 1670 - RNA, 22 nt, Artificial Sequence
  SAMD9L targeting guide sequence portion
uuccuguauuucagauacacua

SEQ ID NO: 1671 - RNA, 22 nt, Artificial Sequence
  SAMD9L targeting guide sequence portion
uugaccuaguguaucugaaaua

SEQ ID NO: 1672 - RNA, 20 nt, Artificial Sequence
  SAMD9L targeting guide sequence portion
aaauuucaacauuauguuca

SEQ ID NO: 1673 - RNA, 20 nt, Artificial Sequence
  SAMD9L targeting guide sequence portion
aacauaauguugaaauuugu

SEQ ID NO: 1674 - RNA, 20 nt, Artificial Sequence
  SAMD9L targeting guide sequence portion
aacauuauguucaaacucuu

SEQ ID NO: 1675 - RNA, 20 nt, Artificial Sequence
  SAMD9L targeting guide sequence portion
aagagacaaauuucaacauu

SEQ ID NO: 1676 - RNA, 20 nt, Artificial Sequence
  SAMD9L targeting guide sequence portion
aagaguuugaacauaauguu

SEQ ID NO: 1677 - RNA, 20 nt, Artificial Sequence
  SAMD9L targeting guide sequence portion
aagcagaagaguuugaacau

SEQ ID NO: 1678 - RNA, 20 nt, Artificial Sequence
  SAMD9L targeting guide sequence portion
aauaggaagagacaaauuuc

SEQ ID NO: 1679 - RNA, 20 nt, Artificial Sequence
  SAMD9L targeting guide sequence portion
aauguugaaauuugucucuu

SEQ ID NO: 1680 - RNA, 20 nt, Artificial Sequence
  SAMD9L targeting guide sequence portion
aauuucaacauuauguucaa

SEQ ID NO: 1681 - RNA, 20 nt, Artificial Sequence
  SAMD9L targeting guide sequence portion
acaaauuucaacauuauguu

SEQ ID NO: 1682 - RNA, 20 nt, Artificial Sequence
  SAMD9L targeting guide sequence portion
acauaauguugaaauuuguc

SEQ ID NO: 1683 - RNA, 20 nt, Artificial Sequence
  SAMD9L targeting guide sequence portion
acauuauguucaaacucuuc

SEQ ID NO: 1684 - RNA, 20 nt, Artificial Sequence
  SAMD9L targeting guide sequence portion
agaagaguuugaacauaaug

SEQ ID NO: 1685 - RNA, 20 nt, Artificial Sequence
  SAMD9L targeting guide sequence portion
agacaaauuucaacauuaug

SEQ ID NO: 1686 - RNA, 20 nt, Artificial Sequence
  SAMD9L targeting guide sequence portion
agagacaaauuucaacauua

SEQ ID NO: 1687 - RNA, 20 nt, Artificial Sequence
  SAMD9L targeting guide sequence portion
agaguuugaacauaauguug

SEQ ID NO: 1688 - RNA, 20 nt, Artificial Sequence
  SAMD9L targeting guide sequence portion
agcagaagaguuugaacaua

SEQ ID NO: 1689 - RNA, 20 nt, Artificial Sequence
  SAMD9L targeting guide sequence portion
aggaagagacaaauuucaac

SEQ ID NO: 1690 - RNA, 20 nt, Artificial Sequence
  SAMD9L targeting guide sequence portion
aguuugaacauaauguugaa

SEQ ID NO: 1691 - RNA, 20 nt, Artificial Sequence
  SAMD9L targeting guide sequence portion
auaauguugaaauuugucuc

SEQ ID NO: 1692 - RNA, 20 nt, Artificial Sequence
  SAMD9L targeting guide sequence portion
auaggaagagacaaauuuca

SEQ ID NO: 1693 - RNA, 20 nt, Artificial Sequence
  SAMD9L targeting guide sequence portion
auuauguucaaacucuucug

SEQ ID NO: 1694 - RNA, 20 nt, Artificial Sequence
  SAMD9L targeting guide sequence portion
auuucaacauuauguucaaa

SEQ ID NO: 1695 - RNA, 20 nt, Artificial Sequence
  SAMD9L targeting guide sequence portion
caaauuucaacauuauguuc

SEQ ID NO: 1696 - RNA, 20 nt, Artificial Sequence
  SAMD9L targeting guide sequence portion
caacauuauguucaaacucu

SEQ ID NO: 1697 - RNA, 20 nt, Artificial Sequence
  SAMD9L targeting guide sequence portion
cagaagaguuugaacauaau

SEQ ID NO: 1698 - RNA, 20 nt, Artificial Sequence
  SAMD9L targeting guide sequence portion
cauaauguugaaauuugucu

SEQ ID NO: 1699 - RNA, 20 nt, Artificial Sequence
  SAMD9L targeting guide sequence portion
cauuauguucaaacucuucu

SEQ ID NO: 1700 - RNA, 20 nt, Artificial Sequence
  SAMD9L targeting guide sequence portion
cuuguaagcagaagaguuug

SEQ ID NO: 1701 - RNA, 20 nt, Artificial Sequence
  SAMD9L targeting guide sequence portion
gaacauaauguugaaauuug

SEQ ID NO: 1702 - RNA, 20 nt, Artificial Sequence
  SAMD9L targeting guide sequence portion
gaagagacaaauuucaacau

SEQ ID NO: 1703 - RNA, 20 nt, Artificial Sequence
  SAMD9L targeting guide sequence portion
gaagaguuugaacauaaugu

SEQ ID NO: 1704 - RNA, 20 nt, Artificial Sequence
  SAMD9L targeting guide sequence portion
gacaaauuucaacauuaugu

SEQ ID NO: 1705 - RNA, 20 nt, Artificial Sequence
  SAMD9L targeting guide sequence portion
gagacaaauuucaacauuau

SEQ ID NO: 1706 - RNA, 20 nt, Artificial Sequence
  SAMD9L targeting guide sequence portion
gaguuugaacauaauguuga

SEQ ID NO: 1707 - RNA, 20 nt, Artificial Sequence
  SAMD9L targeting guide sequence portion
gcagaagaguuugaacauaa

SEQ ID NO: 1708 - RNA, 20 nt, Artificial Sequence
  SAMD9L targeting guide sequence portion
ggaagagacaaauuucaaca

SEQ ID NO: 1709 - RNA, 20 nt, Artificial Sequence
  SAMD9L targeting guide sequence portion
guaagcagaagaguuugaac

SEQ ID NO: 1710 - RNA, 20 nt, Artificial Sequence
  SAMD9L targeting guide sequence portion
guuugaacauaauguugaaa

SEQ ID NO: 1711 - RNA, 20 nt, Artificial Sequence
  SAMD9L targeting guide sequence portion
uaagcagaagaguuugaaca

SEQ ID NO: 1712 - RNA, 20 nt, Artificial Sequence
  SAMD9L targeting guide sequence portion
uaauguugaaauuugucucu

SEQ ID NO: 1713 - RNA, 20 nt, Artificial Sequence
  SAMD9L targeting guide sequence portion
uaggaagagacaaauuucaa

SEQ ID NO: 1714 - RNA, 20 nt, Artificial Sequence
  SAMD9L targeting guide sequence portion
uauguucaaacucuucugcu

SEQ ID NO: 1715 - RNA, 20 nt, Artificial Sequence
  SAMD9L targeting guide sequence portion
ucaacauuauguucaaacuc

SEQ ID NO: 1716 - RNA, 20 nt, Artificial Sequence
  SAMD9L targeting guide sequence portion
ugaacauaauguugaaauuu

SEQ ID NO: 1717 - RNA, 20 nt, Artificial Sequence
  SAMD9L targeting guide sequence portion
uguaagcagaagaguuugaa

SEQ ID NO: 1718 - RNA, 20 nt, Artificial Sequence
  SAMD9L targeting guide sequence portion
uuauguucaaacucuucugc

SEQ ID NO: 1719 - RNA, 20 nt, Artificial Sequence
  SAMD9L targeting guide sequence portion
uucaacauuauguucaaacu

SEQ ID NO: 1720 - RNA, 20 nt, Artificial Sequence
  SAMD9L targeting guide sequence portion
uugaacauaauguugaaauu

SEQ ID NO: 1721 - RNA, 20 nt, Artificial Sequence
  SAMD9L targeting guide sequence portion
uuguaagcagaagaguuuga

SEQ ID NO: 1722 - RNA, 20 nt, Artificial Sequence
  SAMD9L targeting guide sequence portion
uuucaacauuauguucaaac

SEQ ID NO: 1723 - RNA, 20 nt, Artificial Sequence
  SAMD9L targeting guide sequence portion
uuugaacauaauguugaaau

SEQ ID NO: 1724 - RNA, 21 nt, Artificial Sequence
  SAMD9L targeting guide sequence portion
aacauaauguugaaauuuguc

SEQ ID NO: 1725 - RNA, 21 nt, Artificial Sequence
  SAMD9L targeting guide sequence portion
aacauuauguucaaacucuuc

SEQ ID NO: 1726 - RNA, 21 nt, Artificial Sequence
  SAMD9L targeting guide sequence portion
aagagacaaauuucaacauua

SEQ ID NO: 1727 - RNA, 21 nt, Artificial Sequence
  SAMD9L targeting guide sequence portion
aagaguuugaacauaauguug

SEQ ID NO: 1728 - RNA, 21 nt, Artificial Sequence
  SAMD9L targeting guide sequence portion
aagcagaagaguuugaacaua

SEQ ID NO: 1729 - RNA, 21 nt, Artificial Sequence
  SAMD9L targeting guide sequence portion
aauaggaagagacaaauuuca

SEQ ID NO: 1730 - RNA, 21 nt, Artificial Sequence
  SAMD9L targeting guide sequence portion
aauguugaaauuugucucuuc

SEQ ID NO: 1731 - RNA, 21 nt, Artificial Sequence
  SAMD9L targeting guide sequence portion
acaaauuucaacauuauguuc

SEQ ID NO: 1732 - RNA, 21 nt, Artificial Sequence
  SAMD9L targeting guide sequence portion
acauaauguugaaauuugucu

SEQ ID NO: 1733 - RNA, 21 nt, Artificial Sequence
  SAMD9L targeting guide sequence portion
acauuauguucaaacucuucu

SEQ ID NO: 1734 - RNA, 21 nt, Artificial Sequence
  SAMD9L targeting guide sequence portion
agaagaguuugaacauaaugu

SEQ ID NO: 1735 - RNA, 21 nt, Artificial Sequence
  SAMD9L targeting guide sequence portion
agacaaauuucaacauuaugu

SEQ ID NO: 1736 - RNA, 21 nt, Artificial Sequence
  SAMD9L targeting guide sequence portion
agagacaaauuucaacauuau

SEQ ID NO: 1737 - RNA, 21 nt, Artificial Sequence
  SAMD9L targeting guide sequence portion
agaguuugaacauaauguuga

SEQ ID NO: 1738 - RNA, 21 nt, Artificial Sequence
  SAMD9L targeting guide sequence portion
agcagaagaguuugaacauaa

SEQ ID NO: 1739 - RNA, 21 nt, Artificial Sequence
  SAMD9L targeting guide sequence portion
aggaagagacaaauuucaaca

SEQ ID NO: 1740 - RNA, 21 nt, Artificial Sequence
  SAMD9L targeting guide sequence portion
aguuugaacauaauguugaaa

SEQ ID NO: 1741 - RNA, 21 nt, Artificial Sequence
  SAMD9L targeting guide sequence portion
auaauguugaaauuugucucu

SEQ ID NO: 1742 - RNA, 21 nt, Artificial Sequence
  SAMD9L targeting guide sequence portion
auaggaagagacaaauuucaa

SEQ ID NO: 1743 - RNA, 21 nt, Artificial Sequence
  SAMD9L targeting guide sequence portion
auuauguucaaacucuucugc

SEQ ID NO: 1744 - RNA, 21 nt, Artificial Sequence
  SAMD9L targeting guide sequence portion
auuucaacauuauguucaaac

SEQ ID NO: 1745 - RNA, 21 nt, Artificial Sequence
  SAMD9L targeting guide sequence portion
caaauuucaacauuauguuca

SEQ ID NO: 1746 - RNA, 21 nt, Artificial Sequence
  SAMD9L targeting guide sequence portion
caacauuauguucaaacucuu

SEQ ID NO: 1747 - RNA, 21 nt, Artificial Sequence
  SAMD9L targeting guide sequence portion
cagaagaguuugaacauaaug

SEQ ID NO: 1748 - RNA, 21 nt, Artificial Sequence
  SAMD9L targeting guide sequence portion
cauaauguugaaauuugucuc

SEQ ID NO: 1749 - RNA, 21 nt, Artificial Sequence
  SAMD9L targeting guide sequence portion
cauuauguucaaacucuucug

SEQ ID NO: 1750 - RNA, 21 nt, Artificial Sequence
  SAMD9L targeting guide sequence portion
cuuguaagcagaagaguuuga

SEQ ID NO: 1751 - RNA, 21 nt, Artificial Sequence
  SAMD9L targeting guide sequence portion
gaacauaauguugaaauuugu

SEQ ID NO: 1752 - RNA, 21 nt, Artificial Sequence
  SAMD9L targeting guide sequence portion
gaagagacaaauuucaacauu

SEQ ID NO: 1753 - RNA, 21 nt, Artificial Sequence
  SAMD9L targeting guide sequence portion
gaagaguuugaacauaauguu

SEQ ID NO: 1754 - RNA, 21 nt, Artificial Sequence
  SAMD9L targeting guide sequence portion
gaauaggaagagacaaauuuc

SEQ ID NO: 1755 - RNA, 21 nt, Artificial Sequence
  SAMD9L targeting guide sequence portion
gacaaauuucaacauuauguu

SEQ ID NO: 1756 - RNA, 21 nt, Artificial Sequence
  SAMD9L targeting guide sequence portion
gagacaaauuucaacauuaug

SEQ ID NO: 1757 - RNA, 21 nt, Artificial Sequence
  SAMD9L targeting guide sequence portion
gaguuugaacauaauguugaa

SEQ ID NO: 1758 - RNA, 21 nt, Artificial Sequence
  SAMD9L targeting guide sequence portion
gcagaagaguuugaacauaau

SEQ ID NO: 1759 - RNA, 21 nt, Artificial Sequence
  SAMD9L targeting guide sequence portion
ggaagagacaaauuucaacau

SEQ ID NO: 1760 - RNA, 21 nt, Artificial Sequence
  SAMD9L targeting guide sequence portion
guaagcagaagaguuugaaca

SEQ ID NO: 1761 - RNA, 21 nt, Artificial Sequence
  SAMD9L targeting guide sequence portion
guuugaacauaauguugaaau

SEQ ID NO: 1762 - RNA, 21 nt, Artificial Sequence
  SAMD9L targeting guide sequence portion
uaagcagaagaguuugaacau

SEQ ID NO: 1763 - RNA, 21 nt, Artificial Sequence
  SAMD9L targeting guide sequence portion
uaauguugaaauuugucucuu

SEQ ID NO: 1764 - RNA, 21 nt, Artificial Sequence
  SAMD9L targeting guide sequence portion
uaggaagagacaaauuucaac

SEQ ID NO: 1765 - RNA, 21 nt, Artificial Sequence
  SAMD9L targeting guide sequence portion
uauguucaaacucuucugcuu

SEQ ID NO: 1766 - RNA, 21 nt, Artificial Sequence
  SAMD9L targeting guide sequence portion
ucaacauuauguucaaacucu

SEQ ID NO: 1767 - RNA, 21 nt, Artificial Sequence
  SAMD9L targeting guide sequence portion
ucuuguaagcagaagaguuug

SEQ ID NO: 1768 - RNA, 21 nt, Artificial Sequence
  SAMD9L targeting guide sequence portion
ugaacauaauguugaaauuug

SEQ ID NO: 1769 - RNA, 21 nt, Artificial Sequence
  SAMD9L targeting guide sequence portion
uguaagcagaagaguuugaac

SEQ ID NO: 1770 - RNA, 21 nt, Artificial Sequence
  SAMD9L targeting guide sequence portion
uuauguucaaacucuucugcu

SEQ ID NO: 1771 - RNA, 21 nt, Artificial Sequence
  SAMD9L targeting guide sequence portion
uucaacauuauguucaaacuc

SEQ ID NO: 1772 - RNA, 21 nt, Artificial Sequence
  SAMD9L targeting guide sequence portion
uuguaagcagaagaguuugaa

SEQ ID NO: 1773 - RNA, 21 nt, Artificial Sequence
  SAMD9L targeting guide sequence portion
uuucaacauuauguucaaacu

SEQ ID NO: 1774 - RNA, 22 nt, Artificial Sequence
  SAMD9L targeting guide sequence portion
aacauaauguugaaauuugucu

SEQ ID NO: 1775 - RNA, 22 nt, Artificial Sequence
  SAMD9L targeting guide sequence portion
aacauuauguucaaacucuucu

SEQ ID NO: 1776 - RNA, 22 nt, Artificial Sequence
  SAMD9L targeting guide sequence portion
aagagacaaauuucaacauuau

SEQ ID NO: 1777 - RNA, 22 nt, Artificial Sequence
  SAMD9L targeting guide sequence portion
aagaguuugaacauaauguuga

SEQ ID NO: 1778 - RNA, 22 nt, Artificial Sequence
  SAMD9L targeting guide sequence portion
aagcagaagaguuugaacauaa

SEQ ID NO: 1779 - RNA, 22 nt, Artificial Sequence
  SAMD9L targeting guide sequence portion
aauaggaagagacaaauuucaa

SEQ ID NO: 1780 - RNA, 22 nt, Artificial Sequence
  SAMD9L targeting guide sequence portion
aauguugaaauuugucucuucc

SEQ ID NO: 1781 - RNA, 22 nt, Artificial Sequence
  SAMD9L targeting guide sequence portion
aauuucaacauuauguucaaac

SEQ ID NO: 1782 - RNA, 22 nt, Artificial Sequence
  SAMD9L targeting guide sequence portion
acaaauuucaacauuauguuca

SEQ ID NO: 1783 - RNA, 22 nt, Artificial Sequence
  SAMD9L targeting guide sequence portion
acauaauguugaaauuugucuc

SEQ ID NO: 1784 - RNA, 22 nt, Artificial Sequence
  SAMD9L targeting guide sequence portion
acauuauguucaaacucuucug

SEQ ID NO: 1785 - RNA, 22 nt, Artificial Sequence
  SAMD9L targeting guide sequence portion
agaagaguuugaacauaauguu

SEQ ID NO: 1786 - RNA, 22 nt, Artificial Sequence
  SAMD9L targeting guide sequence portion
agacaaauuucaacauuauguu

SEQ ID NO: 1787 - RNA, 22 nt, Artificial Sequence
  SAMD9L targeting guide sequence portion
agagacaaauuucaacauuaug

SEQ ID NO: 1788 - RNA, 22 nt, Artificial Sequence
  SAMD9L targeting guide sequence portion
agaguuugaacauaauguugaa

SEQ ID NO: 1789 - RNA, 22 nt, Artificial Sequence
  SAMD9L targeting guide sequence portion
agcagaagaguuugaacauaau

SEQ ID NO: 1790 - RNA, 22 nt, Artificial Sequence
  SAMD9L targeting guide sequence portion
aggaagagacaaauuucaacau

SEQ ID NO: 1791 - RNA, 22 nt, Artificial Sequence
  SAMD9L targeting guide sequence portion
aguuugaacauaauguugaaau

SEQ ID NO: 1792 - RNA, 22 nt, Artificial Sequence
  SAMD9L targeting guide sequence portion
auaauguugaaauuugucucuu

SEQ ID NO: 1793 - RNA, 22 nt, Artificial Sequence
  SAMD9L targeting guide sequence portion
auaggaagagacaaauuucaac

SEQ ID NO: 1794 - RNA, 22 nt, Artificial Sequence
  SAMD9L targeting guide sequence portion
auuauguucaaacucuucugcu

SEQ ID NO: 1795 - RNA, 22 nt, Artificial Sequence
  SAMD9L targeting guide sequence portion
auuucaacauuauguucaaacu

SEQ ID NO: 1796 - RNA, 22 nt, Artificial Sequence
  SAMD9L targeting guide sequence portion
caaauuucaacauuauguucaa

SEQ ID NO: 1797 - RNA, 22 nt, Artificial Sequence
  SAMD9L targeting guide sequence portion
caacauuauguucaaacucuuc

SEQ ID NO: 1798 - RNA, 22 nt, Artificial Sequence
  SAMD9L targeting guide sequence portion
cagaagaguuugaacauaaugu

SEQ ID NO: 1799 - RNA, 22 nt, Artificial Sequence
  SAMD9L targeting guide sequence portion
cauaauguugaaauuugucucu

SEQ ID NO: 1800 - RNA, 22 nt, Artificial Sequence
  SAMD9L targeting guide sequence portion
cauuauguucaaacucuucugc

SEQ ID NO: 1801 - RNA, 22 nt, Artificial Sequence
  SAMD9L targeting guide sequence portion
cuuguaagcagaagaguuugaa

SEQ ID NO: 1802 - RNA, 22 nt, Artificial Sequence
  SAMD9L targeting guide sequence portion
gaacauaauguugaaauuuguc

SEQ ID NO: 1803 - RNA, 22 nt, Artificial Sequence
  SAMD9L targeting guide sequence portion
gaagagacaaauuucaacauua

SEQ ID NO: 1804 - RNA, 22 nt, Artificial Sequence
  SAMD9L targeting guide sequence portion
gaagaguuugaacauaauguug

SEQ ID NO: 1805 - RNA, 22 nt, Artificial Sequence
  SAMD9L targeting guide sequence portion
gaauaggaagagacaaauuuca

SEQ ID NO: 1806 - RNA, 22 nt, Artificial Sequence
  SAMD9L targeting guide sequence portion
gacaaauuucaacauuauguuc

SEQ ID NO: 1807 - RNA, 22 nt, Artificial Sequence
  SAMD9L targeting guide sequence portion
gagacaaauuucaacauuaugu

SEQ ID NO: 1808 - RNA, 22 nt, Artificial Sequence
  SAMD9L targeting guide sequence portion
gaguuugaacauaauguugaaa

SEQ ID NO: 1809 - RNA, 22 nt, Artificial Sequence
  SAMD9L targeting guide sequence portion
gcagaagaguuugaacauaaug

SEQ ID NO: 1810 - RNA, 22 nt, Artificial Sequence
  SAMD9L targeting guide sequence portion
ggaagagacaaauuucaacauu

SEQ ID NO: 1811 - RNA, 22 nt, Artificial Sequence
  SAMD9L targeting guide sequence portion
ggaauaggaagagacaaauuuc

SEQ ID NO: 1812 - RNA, 22 nt, Artificial Sequence
  SAMD9L targeting guide sequence portion
guaagcagaagaguuugaacau

SEQ ID NO: 1813 - RNA, 22 nt, Artificial Sequence
  SAMD9L targeting guide sequence portion
gucuuguaagcagaagaguuug

SEQ ID NO: 1814 - RNA, 22 nt, Artificial Sequence
  SAMD9L targeting guide sequence portion
guuugaacauaauguugaaauu

SEQ ID NO: 1815 - RNA, 22 nt, Artificial Sequence
  SAMD9L targeting guide sequence portion
uaagcagaagaguuugaacaua

SEQ ID NO: 1816 - RNA, 22 nt, Artificial Sequence
  SAMD9L targeting guide sequence portion
uaauguugaaauuugucucuuc

SEQ ID NO: 1817 - RNA, 22 nt, Artificial Sequence
  SAMD9L targeting guide sequence portion
uaggaagagacaaauuucaaca

SEQ ID NO: 1818 - RNA, 22 nt, Artificial Sequence
  SAMD9L targeting guide sequence portion
uauguucaaacucuucugcuua

SEQ ID NO: 1819 - RNA, 22 nt, Artificial Sequence
  SAMD9L targeting guide sequence portion
ucaacauuauguucaaacucuu

SEQ ID NO: 1820 - RNA, 22 nt, Artificial Sequence
  SAMD9L targeting guide sequence portion
ucuuguaagcagaagaguuuga

SEQ ID NO: 1821 - RNA, 22 nt, Artificial Sequence
  SAMD9L targeting guide sequence portion
ugaacauaauguugaaauuugu

SEQ ID NO: 1822 - RNA, 22 nt, Artificial Sequence
  SAMD9L targeting guide sequence portion
uguaagcagaagaguuugaaca

SEQ ID NO: 1823 - RNA, 22 nt, Artificial Sequence
  SAMD9L targeting guide sequence portion
uuauguucaaacucuucugcuu

SEQ ID NO: 1824 - RNA, 22 nt, Artificial Sequence
  SAMD9L targeting guide sequence portion
uucaacauuauguucaaacucu

SEQ ID NO: 1825 - RNA, 22 nt, Artificial Sequence
  SAMD9L targeting guide sequence portion
uugaacauaauguugaaauuug

SEQ ID NO: 1826 - RNA, 22 nt, Artificial Sequence
  SAMD9L targeting guide sequence portion
uuguaagcagaagaguuugaac

SEQ ID NO: 1827 - RNA, 22 nt, Artificial Sequence
  SAMD9L targeting guide sequence portion
uuucaacauuauguucaaacuc

SEQ ID NO: 1828 - RNA, 20 nt, Artificial Sequence
  SAMD9L targeting guide sequence portion
aaucagagggugagugauac

SEQ ID NO: 1829 - RNA, 20 nt, Artificial Sequence
  SAMD9L targeting guide sequence portion
acacaggugugcguaucacu

SEQ ID NO: 1830 - RNA, 20 nt, Artificial Sequence
  SAMD9L targeting guide sequence portion
acagggcaaucagaggguga

SEQ ID NO: 1831 - RNA, 20 nt, Artificial Sequence
  SAMD9L targeting guide sequence portion
acaggugugcguaucacuca

SEQ ID NO: 1832 - RNA, 20 nt, Artificial Sequence
  SAMD9L targeting guide sequence portion
acaguacagggcaaucagag

SEQ ID NO: 1833 - RNA, 20 nt, Artificial Sequence
  SAMD9L targeting guide sequence portion
acucacccucugauugcccu

SEQ ID NO: 1834 - RNA, 20 nt, Artificial Sequence
  SAMD9L targeting guide sequence portion
agagggugagugauacgcac

SEQ ID NO: 1835 - RNA, 20 nt, Artificial Sequence
  SAMD9L targeting guide sequence portion
agauacacaggugugcguau

SEQ ID NO: 1836 - RNA, 20 nt, Artificial Sequence
  SAMD9L targeting guide sequence portion
agggcaaucagagggugagu

SEQ ID NO: 1837 - RNA, 20 nt, Artificial Sequence
  SAMD9L targeting guide sequence portion
agggugagugauacgcacac

SEQ ID NO: 1838 - RNA, 20 nt, Artificial Sequence
  SAMD9L targeting guide sequence portion
aggugugcguaucacucacc

SEQ ID NO: 1839 - RNA, 20 nt, Artificial Sequence
  SAMD9L targeting guide sequence portion
aguacagggcaaucagaggg

SEQ ID NO: 1840 - RNA, 20 nt, Artificial Sequence
  SAMD9L targeting guide sequence portion
agugauacgcacaccugugu

SEQ ID NO: 1841 - RNA, 20 nt, Artificial Sequence
  SAMD9L targeting guide sequence portion
auacacaggugugcguauca

SEQ ID NO: 1842 - RNA, 20 nt, Artificial Sequence
  SAMD9L targeting guide sequence portion
aucacucacccucugauugc

SEQ ID NO: 1843 - RNA, 20 nt, Artificial Sequence
  SAMD9L targeting guide sequence portion
aucagagggugagugauacg

SEQ ID NO: 1844 - RNA, 20 nt, Artificial Sequence
  SAMD9L targeting guide sequence portion
caaucagagggugagugaua

SEQ ID NO: 1845 - RNA, 20 nt, Artificial Sequence
  SAMD9L targeting guide sequence portion
cacaggugugcguaucacuc

SEQ ID NO: 1846 - RNA, 20 nt, Artificial Sequence
  SAMD9L targeting guide sequence portion
cacucacccucugauugccc

SEQ ID NO: 1847 - RNA, 20 nt, Artificial Sequence
  SAMD9L targeting guide sequence portion
cagagggugagugauacgca

SEQ ID NO: 1848 - RNA, 20 nt, Artificial Sequence
  SAMD9L targeting guide sequence portion
cagggcaaucagagggugag

SEQ ID NO: 1849 - RNA, 20 nt, Artificial Sequence
  SAMD9L targeting guide sequence portion
caggugugcguaucacucac

SEQ ID NO: 1850 - RNA, 20 nt, Artificial Sequence
  SAMD9L targeting guide sequence portion
caguacagggcaaucagagg

SEQ ID NO: 1851 - RNA, 20 nt, Artificial Sequence
  SAMD9L targeting guide sequence portion
cguaucacucacccucugau

SEQ ID NO: 1852 - RNA, 20 nt, Artificial Sequence
  SAMD9L targeting guide sequence portion
cucacccucugauugcccug

SEQ ID NO: 1853 - RNA, 20 nt, Artificial Sequence
  SAMD9L targeting guide sequence portion
gagauacacaggugugcgua

SEQ ID NO: 1854 - RNA, 20 nt, Artificial Sequence
  SAMD9L targeting guide sequence portion
gagggugagugauacgcaca

SEQ ID NO: 1855 - RNA, 20 nt, Artificial Sequence
  SAMD9L targeting guide sequence portion
gagugauacgcacaccugug

SEQ ID NO: 1856 - RNA, 20 nt, Artificial Sequence
  SAMD9L targeting guide sequence portion
gauacacaggugugcguauc

SEQ ID NO: 1857 - RNA, 20 nt, Artificial Sequence
  SAMD9L targeting guide sequence portion
gcaaucagagggugagugau

SEQ ID NO: 1858 - RNA, 20 nt, Artificial Sequence
  SAMD9L targeting guide sequence portion
gcguaucacucacccucuga

SEQ ID NO: 1859 - RNA, 20 nt, Artificial Sequence
  SAMD9L targeting guide sequence portion
ggagauacacaggugugcgu

SEQ ID NO: 1860 - RNA, 20 nt, Artificial Sequence
  SAMD9L targeting guide sequence portion
ggcaaucagagggugaguga

SEQ ID NO: 1861 - RNA, 20 nt, Artificial Sequence
  SAMD9L targeting guide sequence portion
gggagauacacaggugugcg

SEQ ID NO: 1862 - RNA, 20 nt, Artificial Sequence
  SAMD9L targeting guide sequence portion
gggcaaucagagggugagug

SEQ ID NO: 1863 - RNA, 20 nt, Artificial Sequence
  SAMD9L targeting guide sequence portion
gggugagugauacgcacacc

SEQ ID NO: 1864 - RNA, 20 nt, Artificial Sequence
  SAMD9L targeting guide sequence portion
ggugagugauacgcacaccu

SEQ ID NO: 1865 - RNA, 20 nt, Artificial Sequence
  SAMD9L targeting guide sequence portion
ggugugcguaucacucaccc

SEQ ID NO: 1866 - RNA, 20 nt, Artificial Sequence
  SAMD9L targeting guide sequence portion
guacagggcaaucagagggu

SEQ ID NO: 1867 - RNA, 20 nt, Artificial Sequence
  SAMD9L targeting guide sequence portion
guaucacucacccucugauu

SEQ ID NO: 1868 - RNA, 20 nt, Artificial Sequence
  SAMD9L targeting guide sequence portion
gugagugauacgcacaccug

SEQ ID NO: 1869 - RNA, 20 nt, Artificial Sequence
  SAMD9L targeting guide sequence portion
gugauacgcacaccugugua

SEQ ID NO: 1870 - RNA, 20 nt, Artificial Sequence
  SAMD9L targeting guide sequence portion
gugcguaucacucacccucu

SEQ ID NO: 1871 - RNA, 20 nt, Artificial Sequence
  SAMD9L targeting guide sequence portion
gugugcguaucacucacccu

SEQ ID NO: 1872 - RNA, 20 nt, Artificial Sequence
  SAMD9L targeting guide sequence portion
uacacaggugugcguaucac

SEQ ID NO: 1873 - RNA, 20 nt, Artificial Sequence
  SAMD9L targeting guide sequence portion
uacagggcaaucagagggug

SEQ ID NO: 1874 - RNA, 20 nt, Artificial Sequence
  SAMD9L targeting guide sequence portion
uaucacucacccucugauug

SEQ ID NO: 1875 - RNA, 20 nt, Artificial Sequence
  SAMD9L targeting guide sequence portion
ucacucacccucugauugcc

SEQ ID NO: 1876 - RNA, 20 nt, Artificial Sequence
  SAMD9L targeting guide sequence portion
ucagagggugagugauacgc

SEQ ID NO: 1877 - RNA, 20 nt, Artificial Sequence
  SAMD9L targeting guide sequence portion
ugagugauacgcacaccugu

SEQ ID NO: 1878 - RNA, 20 nt, Artificial Sequence
  SAMD9L targeting guide sequence portion
ugcguaucacucacccucug

SEQ ID NO: 1879 - RNA, 20 nt, Artificial Sequence
  SAMD9L targeting guide sequence portion
ugugcguaucacucacccuc

SEQ ID NO: 1880 - RNA, 21 nt, Artificial Sequence
  SAMD9L targeting guide sequence portion
aaucagagggugagugauacg

SEQ ID NO: 1881 - RNA, 21 nt, Artificial Sequence
  SAMD9L targeting guide sequence portion
acacaggugugcguaucacuc

SEQ ID NO: 1882 - RNA, 21 nt, Artificial Sequence
  SAMD9L targeting guide sequence portion
acagggcaaucagagggugag

SEQ ID NO: 1883 - RNA, 21 nt, Artificial Sequence
  SAMD9L targeting guide sequence portion
acaggugugcguaucacucac

SEQ ID NO: 1884 - RNA, 21 nt, Artificial Sequence
  SAMD9L targeting guide sequence portion
acaguacagggcaaucagagg

SEQ ID NO: 1885 - RNA, 21 nt, Artificial Sequence
  SAMD9L targeting guide sequence portion
acucacccucugauugcccug

SEQ ID NO: 1886 - RNA, 21 nt, Artificial Sequence
  SAMD9L targeting guide sequence portion
agagggugagugauacgcaca

SEQ ID NO: 1887 - RNA, 21 nt, Artificial Sequence
  SAMD9L targeting guide sequence portion
agauacacaggugugcguauc

SEQ ID NO: 1888 - RNA, 21 nt, Artificial Sequence
  SAMD9L targeting guide sequence portion
agggcaaucagagggugagug

SEQ ID NO: 1889 - RNA, 21 nt, Artificial Sequence
  SAMD9L targeting guide sequence portion
agggugagugauacgcacacc

SEQ ID NO: 1890 - RNA, 21 nt, Artificial Sequence
  SAMD9L targeting guide sequence portion
aggugugcguaucacucaccc

SEQ ID NO: 1891 - RNA, 21 nt, Artificial Sequence
  SAMD9L targeting guide sequence portion
aguacagggcaaucagagggu

SEQ ID NO: 1892 - RNA, 21 nt, Artificial Sequence
  SAMD9L targeting guide sequence portion
agugauacgcacaccugugua

SEQ ID NO: 1893 - RNA, 21 nt, Artificial Sequence
  SAMD9L targeting guide sequence portion
auacacaggugugcguaucac

SEQ ID NO: 1894 - RNA, 21 nt, Artificial Sequence
  SAMD9L targeting guide sequence portion
aucacucacccucugauugcc

SEQ ID NO: 1895 - RNA, 21 nt, Artificial Sequence
  SAMD9L targeting guide sequence portion
aucagagggugagugauacgc

SEQ ID NO: 1896 - RNA, 21 nt, Artificial Sequence
  SAMD9L targeting guide sequence portion
caaucagagggugagugauac

SEQ ID NO: 1897 - RNA, 21 nt, Artificial Sequence
  SAMD9L targeting guide sequence portion
cacaggugugcguaucacuca

SEQ ID NO: 1898 - RNA, 21 nt, Artificial Sequence
  SAMD9L targeting guide sequence portion
cacucacccucugauugcccu

SEQ ID NO: 1899 - RNA, 21 nt, Artificial Sequence
  SAMD9L targeting guide sequence portion
cagagggugagugauacgcac

SEQ ID NO: 1900 - RNA, 21 nt, Artificial Sequence
  SAMD9L targeting guide sequence portion
cagggcaaucagagggugagu

SEQ ID NO: 1901 - RNA, 21 nt, Artificial Sequence
  SAMD9L targeting guide sequence portion
caggugugcguaucacucacc

SEQ ID NO: 1902 - RNA, 21 nt, Artificial Sequence
  SAMD9L targeting guide sequence portion
caguacagggcaaucagaggg

SEQ ID NO: 1903 - RNA, 21 nt, Artificial Sequence
  SAMD9L targeting guide sequence portion
cguaucacucacccucugauu

SEQ ID NO: 1904 - RNA, 21 nt, Artificial Sequence
  SAMD9L targeting guide sequence portion
cucacccucugauugcccugu

SEQ ID NO: 1905 - RNA, 21 nt, Artificial Sequence
  SAMD9L targeting guide sequence portion
gacaguacagggcaaucagag

SEQ ID NO: 1906 - RNA, 21 nt, Artificial Sequence
  SAMD9L targeting guide sequence portion
gagauacacaggugugcguau

SEQ ID NO: 1907 - RNA, 21 nt, Artificial Sequence
  SAMD9L targeting guide sequence portion
gagggugagugauacgcacac

SEQ ID NO: 1908 - RNA, 21 nt, Artificial Sequence
  SAMD9L targeting guide sequence portion
gagugauacgcacaccugugu

SEQ ID NO: 1909 - RNA, 21 nt, Artificial Sequence
  SAMD9L targeting guide sequence portion
gauacacaggugugcguauca

SEQ ID NO: 1910 - RNA, 21 nt, Artificial Sequence
  SAMD9L targeting guide sequence portion
gcaaucagagggugagugaua

SEQ ID NO: 1911 - RNA, 21 nt, Artificial Sequence
  SAMD9L targeting guide sequence portion
gcguaucacucacccucugau

SEQ ID NO: 1912 - RNA, 21 nt, Artificial Sequence
  SAMD9L targeting guide sequence portion
ggagauacacaggugugcgua

SEQ ID NO: 1913 - RNA, 21 nt, Artificial Sequence
  SAMD9L targeting guide sequence portion
ggcaaucagagggugagugau

SEQ ID NO: 1914 - RNA, 21 nt, Artificial Sequence
  SAMD9L targeting guide sequence portion
gggagauacacaggugugcgu

SEQ ID NO: 1915 - RNA, 21 nt, Artificial Sequence
  SAMD9L targeting guide sequence portion
gggcaaucagagggugaguga

SEQ ID NO: 1916 - RNA, 21 nt, Artificial Sequence
  SAMD9L targeting guide sequence portion
gggugagugauacgcacaccu

SEQ ID NO: 1917 - RNA, 21 nt, Artificial Sequence
  SAMD9L targeting guide sequence portion
ggugagugauacgcacaccug

SEQ ID NO: 1918 - RNA, 21 nt, Artificial Sequence
  SAMD9L targeting guide sequence portion
ggugugcguaucacucacccu

SEQ ID NO: 1919 - RNA, 21 nt, Artificial Sequence
  SAMD9L targeting guide sequence portion
guacagggcaaucagagggug

SEQ ID NO: 1920 - RNA, 21 nt, Artificial Sequence
  SAMD9L targeting guide sequence portion
guaucacucacccucugauug

SEQ ID NO: 1921 - RNA, 21 nt, Artificial Sequence
  SAMD9L targeting guide sequence portion
gugagugauacgcacaccugu

SEQ ID NO: 1922 - RNA, 21 nt, Artificial Sequence
  SAMD9L targeting guide sequence portion
gugauacgcacaccuguguau

SEQ ID NO: 1923 - RNA, 21 nt, Artificial Sequence
  SAMD9L targeting guide sequence portion
gugcguaucacucacccucug

SEQ ID NO: 1924 - RNA, 21 nt, Artificial Sequence
  SAMD9L targeting guide sequence portion
gugugcguaucacucacccuc

SEQ ID NO: 1925 - RNA, 21 nt, Artificial Sequence
  SAMD9L targeting guide sequence portion
uacacaggugugcguaucacu

SEQ ID NO: 1926 - RNA, 21 nt, Artificial Sequence
  SAMD9L targeting guide sequence portion
uacagggcaaucagaggguga

SEQ ID NO: 1927 - RNA, 21 nt, Artificial Sequence
  SAMD9L targeting guide sequence portion
uaucacucacccucugauugc

SEQ ID NO: 1928 - RNA, 21 nt, Artificial Sequence
  SAMD9L targeting guide sequence portion
ucacucacccucugauugccc

SEQ ID NO: 1929 - RNA, 21 nt, Artificial Sequence
  SAMD9L targeting guide sequence portion
ucagagggugagugauacgca

SEQ ID NO: 1930 - RNA, 21 nt, Artificial Sequence
  SAMD9L targeting guide sequence portion
ugagugauacgcacaccugug

SEQ ID NO: 1931 - RNA, 21 nt, Artificial Sequence
  SAMD9L targeting guide sequence portion
ugcguaucacucacccucuga

SEQ ID NO: 1932 - RNA, 21 nt, Artificial Sequence
  SAMD9L targeting guide sequence portion
ugggagauacacaggugugcg

SEQ ID NO: 1933 - RNA, 21 nt, Artificial Sequence
  SAMD9L targeting guide sequence portion
ugugcguaucacucacccucu

SEQ ID NO: 1934 - RNA, 22 nt, Artificial Sequence
  SAMD9L targeting guide sequence portion
aaucagagggugagugauacgc

SEQ ID NO: 1935 - RNA, 22 nt, Artificial Sequence
  SAMD9L targeting guide sequence portion
acacaggugugcguaucacuca

SEQ ID NO: 1936 - RNA, 22 nt, Artificial Sequence
  SAMD9L targeting guide sequence portion
acagggcaaucagagggugagu

SEQ ID NO: 1937 - RNA, 22 nt, Artificial Sequence
  SAMD9L targeting guide sequence portion
acaggugugcguaucacucacc

SEQ ID NO: 1938 - RNA, 22 nt, Artificial Sequence
  SAMD9L targeting guide sequence portion
acaguacagggcaaucagaggg

SEQ ID NO: 1939 - RNA, 22 nt, Artificial Sequence
  SAMD9L targeting guide sequence portion
acucacccucugauugcccugu

SEQ ID NO: 1940 - RNA, 22 nt, Artificial Sequence
  SAMD9L targeting guide sequence portion
agacaguacagggcaaucagag

SEQ ID NO: 1941 - RNA, 22 nt, Artificial Sequence
  SAMD9L targeting guide sequence portion
agagggugagugauacgcacac

SEQ ID NO: 1942 - RNA, 22 nt, Artificial Sequence
  SAMD9L targeting guide sequence portion
agauacacaggugugcguauca

SEQ ID NO: 1943 - RNA, 22 nt, Artificial Sequence
  SAMD9L targeting guide sequence portion
agggcaaucagagggugaguga

SEQ ID NO: 1944 - RNA, 22 nt, Artificial Sequence
  SAMD9L targeting guide sequence portion
agggugagugauacgcacaccu

SEQ ID NO: 1945 - RNA, 22 nt, Artificial Sequence
  SAMD9L targeting guide sequence portion
aggugugcguaucacucacccu

SEQ ID NO: 1946 - RNA, 22 nt, Artificial Sequence
  SAMD9L targeting guide sequence portion
aguacagggcaaucagagggug

SEQ ID NO: 1947 - RNA, 22 nt, Artificial Sequence
  SAMD9L targeting guide sequence portion
agugauacgcacaccuguguau

SEQ ID NO: 1948 - RNA, 22 nt, Artificial Sequence
  SAMD9L targeting guide sequence portion
auacacaggugugcguaucacu

SEQ ID NO: 1949 - RNA, 22 nt, Artificial Sequence
  SAMD9L targeting guide sequence portion
aucacucacccucugauugccc

SEQ ID NO: 1950 - RNA, 22 nt, Artificial Sequence
  SAMD9L targeting guide sequence portion
aucagagggugagugauacgca

SEQ ID NO: 1951 - RNA, 22 nt, Artificial Sequence
  SAMD9L targeting guide sequence portion
augggagauacacaggugugcg

SEQ ID NO: 1952 - RNA, 22 nt, Artificial Sequence
  SAMD9L targeting guide sequence portion
caaucagagggugagugauacg

SEQ ID NO: 1953 - RNA, 22 nt, Artificial Sequence
  SAMD9L targeting guide sequence portion
cacaggugugcguaucacucac

SEQ ID NO: 1954 - RNA, 22 nt, Artificial Sequence
  SAMD9L targeting guide sequence portion
cacucacccucugauugcccug

SEQ ID NO: 1955 - RNA, 22 nt, Artificial Sequence
  SAMD9L targeting guide sequence portion
cagagggugagugauacgcaca

SEQ ID NO: 1956 - RNA, 22 nt, Artificial Sequence
  SAMD9L targeting guide sequence portion
cagggcaaucagagggugagug

SEQ ID NO: 1957 - RNA, 22 nt, Artificial Sequence
  SAMD9L targeting guide sequence portion
caggugugcguaucacucaccc

SEQ ID NO: 1958 - RNA, 22 nt, Artificial Sequence
  SAMD9L targeting guide sequence portion
caguacagggcaaucagagggu

SEQ ID NO: 1959 - RNA, 22 nt, Artificial Sequence
  SAMD9L targeting guide sequence portion
cguaucacucacccucugauug

SEQ ID NO: 1960 - RNA, 22 nt, Artificial Sequence
  SAMD9L targeting guide sequence portion
cucacccucugauugcccugua

SEQ ID NO: 1961 - RNA, 22 nt, Artificial Sequence
  SAMD9L targeting guide sequence portion
gacaguacagggcaaucagagg

SEQ ID NO: 1962 - RNA, 22 nt, Artificial Sequence
  SAMD9L targeting guide sequence portion
gagauacacaggugugcguauc

SEQ ID NO: 1963 - RNA, 22 nt, Artificial Sequence
  SAMD9L targeting guide sequence portion
gagggugagugauacgcacacc

SEQ ID NO: 1964 - RNA, 22 nt, Artificial Sequence
  SAMD9L targeting guide sequence portion
gagugauacgcacaccugugua

SEQ ID NO: 1965 - RNA, 22 nt, Artificial Sequence
  SAMD9L targeting guide sequence portion
gauacacaggugugcguaucac

SEQ ID NO: 1966 - RNA, 22 nt, Artificial Sequence
  SAMD9L targeting guide sequence portion
gcaaucagagggugagugauac

SEQ ID NO: 1967 - RNA, 22 nt, Artificial Sequence
  SAMD9L targeting guide sequence portion
gcguaucacucacccucugauu

SEQ ID NO: 1968 - RNA, 22 nt, Artificial Sequence
  SAMD9L targeting guide sequence portion
ggagauacacaggugugcguau

SEQ ID NO: 1969 - RNA, 22 nt, Artificial Sequence
  SAMD9L targeting guide sequence portion
ggcaaucagagggugagugaua

SEQ ID NO: 1970 - RNA, 22 nt, Artificial Sequence
  SAMD9L targeting guide sequence portion
gggagauacacaggugugcgua

SEQ ID NO: 1971 - RNA, 22 nt, Artificial Sequence
  SAMD9L targeting guide sequence portion
gggcaaucagagggugagugau

SEQ ID NO: 1972 - RNA, 22 nt, Artificial Sequence
  SAMD9L targeting guide sequence portion
gggugagugauacgcacaccug

SEQ ID NO: 1973 - RNA, 22 nt, Artificial Sequence
  SAMD9L targeting guide sequence portion
ggugagugauacgcacaccugu

SEQ ID NO: 1974 - RNA, 22 nt, Artificial Sequence
  SAMD9L targeting guide sequence portion
ggugugcguaucacucacccuc

SEQ ID NO: 1975 - RNA, 22 nt, Artificial Sequence
  SAMD9L targeting guide sequence portion
guacagggcaaucagaggguga

SEQ ID NO: 1976 - RNA, 22 nt, Artificial Sequence
  SAMD9L targeting guide sequence portion
guaucacucacccucugauugc

SEQ ID NO: 1977 - RNA, 22 nt, Artificial Sequence
  SAMD9L targeting guide sequence portion
gugagugauacgcacaccugug

SEQ ID NO: 1978 - RNA, 22 nt, Artificial Sequence
  SAMD9L targeting guide sequence portion
gugauacgcacaccuguguauc

SEQ ID NO: 1979 - RNA, 22 nt, Artificial Sequence
  SAMD9L targeting guide sequence portion
gugcguaucacucacccucuga

SEQ ID NO: 1980 - RNA, 22 nt, Artificial Sequence
  SAMD9L targeting guide sequence portion
gugugcguaucacucacccucu

SEQ ID NO: 1981 - RNA, 22 nt, Artificial Sequence
  SAMD9L targeting guide sequence portion
uacacaggugugcguaucacuc

SEQ ID NO: 1982 - RNA, 22 nt, Artificial Sequence
  SAMD9L targeting guide sequence portion
uacagggcaaucagagggugag

SEQ ID NO: 1983 - RNA, 22 nt, Artificial Sequence
  SAMD9L targeting guide sequence portion
uaucacucacccucugauugcc

SEQ ID NO: 1984 - RNA, 22 nt, Artificial Sequence
  SAMD9L targeting guide sequence portion
ucacucacccucugauugcccu

SEQ ID NO: 1985 - RNA, 22 nt, Artificial Sequence
  SAMD9L targeting guide sequence portion
ucagagggugagugauacgcac

SEQ ID NO: 1986 - RNA, 22 nt, Artificial Sequence
  SAMD9L targeting guide sequence portion
ugagugauacgcacaccugugu

SEQ ID NO: 1987 - RNA, 22 nt, Artificial Sequence
  SAMD9L targeting guide sequence portion
ugcguaucacucacccucugau

SEQ ID NO: 1988 - RNA, 22 nt, Artificial Sequence
  SAMD9L targeting guide sequence portion
ugggagauacacaggugugcgu

SEQ ID NO: 1989 - RNA, 22 nt, Artificial Sequence
  SAMD9L targeting guide sequence portion
ugugcguaucacucacccucug

SEQ ID NO: 1990 - RNA, 20 nt, Artificial Sequence
  SAMD9L targeting guide sequence portion
aauaugggagauacacaggu

SEQ ID NO: 1991 - RNA, 20 nt, Artificial Sequence
  SAMD9L targeting guide sequence portion
aaucagagggugaaugauac

SEQ ID NO: 1992 - RNA, 20 nt, Artificial Sequence
  SAMD9L targeting guide sequence portion
aaugauacacacaccugugu

SEQ ID NO: 1993 - RNA, 20 nt, Artificial Sequence
  SAMD9L targeting guide sequence portion
acacacaccuguguaucucc

SEQ ID NO: 1994 - RNA, 20 nt, Artificial Sequence
  SAMD9L targeting guide sequence portion
acacaccuguguaucuccca

SEQ ID NO: 1995 - RNA, 20 nt, Artificial Sequence
  SAMD9L targeting guide sequence portion
acacagguguguguaucauu

SEQ ID NO: 1996 - RNA, 20 nt, Artificial Sequence
  SAMD9L targeting guide sequence portion
acagguguguguaucauuca

SEQ ID NO: 1997 - RNA, 20 nt, Artificial Sequence
  SAMD9L targeting guide sequence portion
agaauaugggagauacacag

SEQ ID NO: 1998 - RNA, 20 nt, Artificial Sequence
  SAMD9L targeting guide sequence portion
agagggugaaugauacacac

SEQ ID NO: 1999 - RNA, 20 nt, Artificial Sequence
  SAMD9L targeting guide sequence portion
agauacacagguguguguau

SEQ ID NO: 2000 - RNA, 20 nt, Artificial Sequence
  SAMD9L targeting guide sequence portion
agggcaaucagagggugaau

SEQ ID NO: 2001 - RNA, 20 nt, Artificial Sequence
  SAMD9L targeting guide sequence portion
agggugaaugauacacacac

SEQ ID NO: 2002 - RNA, 20 nt, Artificial Sequence
  SAMD9L targeting guide sequence portion
agguguguguaucauucacc

SEQ ID NO: 2003 - RNA, 20 nt, Artificial Sequence
  SAMD9L targeting guide sequence portion
auacacacaccuguguaucu

SEQ ID NO: 2004 - RNA, 20 nt, Artificial Sequence
  SAMD9L targeting guide sequence portion
auacacagguguguguauca

SEQ ID NO: 2005 - RNA, 20 nt, Artificial Sequence
  SAMD9L targeting guide sequence portion
auaugggagauacacaggug

SEQ ID NO: 2006 - RNA, 20 nt, Artificial Sequence
  SAMD9L targeting guide sequence portion
aucagagggugaaugauaca

SEQ ID NO: 2007 - RNA, 20 nt, Artificial Sequence
  SAMD9L targeting guide sequence portion
augauacacacaccugugua

SEQ ID NO: 2008 - RNA, 20 nt, Artificial Sequence
  SAMD9L targeting guide sequence portion
augggagauacacaggugug

SEQ ID NO: 2009 - RNA, 20 nt, Artificial Sequence
  SAMD9L targeting guide sequence portion
caaucagagggugaaugaua

SEQ ID NO: 2010 - RNA, 20 nt, Artificial Sequence
  SAMD9L targeting guide sequence portion
cacacaccuguguaucuccc

SEQ ID NO: 2011 - RNA, 20 nt, Artificial Sequence
  SAMD9L targeting guide sequence portion
cacagguguguguaucauuc

SEQ ID NO: 2012 - RNA, 20 nt, Artificial Sequence
  SAMD9L targeting guide sequence portion
cagagggugaaugauacaca

SEQ ID NO: 2013 - RNA, 20 nt, Artificial Sequence
  SAMD9L targeting guide sequence portion
cagguguguguaucauucac

SEQ ID NO: 2014 - RNA, 20 nt, Artificial Sequence
  SAMD9L targeting guide sequence portion
gaauaugggagauacacagg

SEQ ID NO: 2015 - RNA, 20 nt, Artificial Sequence
  SAMD9L targeting guide sequence portion
gaaugauacacacaccugug

SEQ ID NO: 2016 - RNA, 20 nt, Artificial Sequence
  SAMD9L targeting guide sequence portion
gagauacacaggugugugua

SEQ ID NO: 2017 - RNA, 20 nt, Artificial Sequence
  SAMD9L targeting guide sequence portion
gagggugaaugauacacaca

SEQ ID NO: 2018 - RNA, 20 nt, Artificial Sequence
  SAMD9L targeting guide sequence portion
gauacacacaccuguguauc

SEQ ID NO: 2019 - RNA, 20 nt, Artificial Sequence
  SAMD9L targeting guide sequence portion
gauacacagguguguguauc

SEQ ID NO: 2020 - RNA, 20 nt, Artificial Sequence
  SAMD9L targeting guide sequence portion
gcaaucagagggugaaugau

SEQ ID NO: 2021 - RNA, 20 nt, Artificial Sequence
  SAMD9L targeting guide sequence portion
ggagauacacaggugugugu

SEQ ID NO: 2022 - RNA, 20 nt, Artificial Sequence
  SAMD9L targeting guide sequence portion
ggcaaucagagggugaauga

SEQ ID NO: 2023 - RNA, 20 nt, Artificial Sequence
  SAMD9L targeting guide sequence portion
gggagauacacaggugugug

SEQ ID NO: 2024 - RNA, 20 nt, Artificial Sequence
  SAMD9L targeting guide sequence portion
gggcaaucagagggugaaug

SEQ ID NO: 2025 - RNA, 20 nt, Artificial Sequence
  SAMD9L targeting guide sequence portion
gggugaaugauacacacacc

SEQ ID NO: 2026 - RNA, 20 nt, Artificial Sequence
  SAMD9L targeting guide sequence portion
ggugaaugauacacacaccu

SEQ ID NO: 2027 - RNA, 20 nt, Artificial Sequence
  SAMD9L targeting guide sequence portion
gguguguguaucauucaccc

SEQ ID NO: 2028 - RNA, 20 nt, Artificial Sequence
  SAMD9L targeting guide sequence portion
gugaaugauacacacaccug

SEQ ID NO: 2029 - RNA, 20 nt, Artificial Sequence
  SAMD9L targeting guide sequence portion
guguaucauucacccucuga

SEQ ID NO: 2030 - RNA, 20 nt, Artificial Sequence
  SAMD9L targeting guide sequence portion
guguguaucauucacccucu

SEQ ID NO: 2031 - RNA, 20 nt, Artificial Sequence
  SAMD9L targeting guide sequence portion
guguguguaucauucacccu

SEQ ID NO: 2032 - RNA, 20 nt, Artificial Sequence
  SAMD9L targeting guide sequence portion
uacacacaccuguguaucuc

SEQ ID NO: 2033 - RNA, 20 nt, Artificial Sequence
  SAMD9L targeting guide sequence portion
uacacagguguguguaucau

SEQ ID NO: 2034 - RNA, 20 nt, Artificial Sequence
  SAMD9L targeting guide sequence portion
uaugggagauacacaggugu

SEQ ID NO: 2035 - RNA, 20 nt, Artificial Sequence
  SAMD9L targeting guide sequence portion
ucagagggugaaugauacac

SEQ ID NO: 2036 - RNA, 20 nt, Artificial Sequence
  SAMD9L targeting guide sequence portion
ugaaugauacacacaccugu

SEQ ID NO: 2037 - RNA, 20 nt, Artificial Sequence
  SAMD9L targeting guide sequence portion
ugauacacacaccuguguau

SEQ ID NO: 2038 - RNA, 20 nt, Artificial Sequence
  SAMD9L targeting guide sequence portion
ugggagauacacaggugugu

SEQ ID NO: 2039 - RNA, 20 nt, Artificial Sequence
  SAMD9L targeting guide sequence portion
uguaucauucacccucugau

SEQ ID NO: 2040 - RNA, 20 nt, Artificial Sequence
  SAMD9L targeting guide sequence portion
uguguaucauucacccucug

SEQ ID NO: 2041 - RNA, 20 nt, Artificial Sequence
  SAMD9L targeting guide sequence portion
uguguguaucauucacccuc

SEQ ID NO: 2042 - RNA, 21 nt, Artificial Sequence
  SAMD9L targeting guide sequence portion
aauaugggagauacacaggug

SEQ ID NO: 2043 - RNA, 21 nt, Artificial Sequence
  SAMD9L targeting guide sequence portion
aaucagagggugaaugauaca

SEQ ID NO: 2044 - RNA, 21 nt, Artificial Sequence
  SAMD9L targeting guide sequence portion
aaugauacacacaccugugua

SEQ ID NO: 2045 - RNA, 21 nt, Artificial Sequence
  SAMD9L targeting guide sequence portion
acacacaccuguguaucuccc

SEQ ID NO: 2046 - RNA, 21 nt, Artificial Sequence
  SAMD9L targeting guide sequence portion
acacaccuguguaucucccau

SEQ ID NO: 2047 - RNA, 21 nt, Artificial Sequence
  SAMD9L targeting guide sequence portion
acacagguguguguaucauuc

SEQ ID NO: 2048 - RNA, 21 nt, Artificial Sequence
  SAMD9L targeting guide sequence portion
acagguguguguaucauucac

SEQ ID NO: 2049 - RNA, 21 nt, Artificial Sequence
  SAMD9L targeting guide sequence portion
agaauaugggagauacacagg

SEQ ID NO: 2050 - RNA, 21 nt, Artificial Sequence
  SAMD9L targeting guide sequence portion
agagggugaaugauacacaca

SEQ ID NO: 2051 - RNA, 21 nt, Artificial Sequence
  SAMD9L targeting guide sequence portion
agauacacagguguguguauc

SEQ ID NO: 2052 - RNA, 21 nt, Artificial Sequence
  SAMD9L targeting guide sequence portion
agggcaaucagagggugaaug

SEQ ID NO: 2053 - RNA, 21 nt, Artificial Sequence
  SAMD9L targeting guide sequence portion
agggugaaugauacacacacc

SEQ ID NO: 2054 - RNA, 21 nt, Artificial Sequence
  SAMD9L targeting guide sequence portion
agguguguguaucauucaccc

SEQ ID NO: 2055 - RNA, 21 nt, Artificial Sequence
  SAMD9L targeting guide sequence portion
auacacacaccuguguaucuc

SEQ ID NO: 2056 - RNA, 21 nt, Artificial Sequence
  SAMD9L targeting guide sequence portion
auacacagguguguguaucau

SEQ ID NO: 2057 - RNA, 21 nt, Artificial Sequence
  SAMD9L targeting guide sequence portion
auaugggagauacacaggugu

SEQ ID NO: 2058 - RNA, 21 nt, Artificial Sequence
  SAMD9L targeting guide sequence portion
aucagagggugaaugauacac

SEQ ID NO: 2059 - RNA, 21 nt, Artificial Sequence
  SAMD9L targeting guide sequence portion
augauacacacaccuguguau

SEQ ID NO: 2060 - RNA, 21 nt, Artificial Sequence
  SAMD9L targeting guide sequence portion
augggagauacacaggugugu

SEQ ID NO: 2061 - RNA, 21 nt, Artificial Sequence
  SAMD9L targeting guide sequence portion
caaucagagggugaaugauac

SEQ ID NO: 2062 - RNA, 21 nt, Artificial Sequence
  SAMD9L targeting guide sequence portion
cacacaccuguguaucuccca

SEQ ID NO: 2063 - RNA, 21 nt, Artificial Sequence
  SAMD9L targeting guide sequence portion
cacagguguguguaucauuca

SEQ ID NO: 2064 - RNA, 21 nt, Artificial Sequence
  SAMD9L targeting guide sequence portion
cagaauaugggagauacacag

SEQ ID NO: 2065 - RNA, 21 nt, Artificial Sequence
  SAMD9L targeting guide sequence portion
cagagggugaaugauacacac

SEQ ID NO: 2066 - RNA, 21 nt, Artificial Sequence
  SAMD9L targeting guide sequence portion
cagggcaaucagagggugaau

SEQ ID NO: 2067 - RNA, 21 nt, Artificial Sequence
  SAMD9L targeting guide sequence portion
cagguguguguaucauucacc

SEQ ID NO: 2068 - RNA, 21 nt, Artificial Sequence
  SAMD9L targeting guide sequence portion
gaauaugggagauacacaggu

SEQ ID NO: 2069 - RNA, 21 nt, Artificial Sequence
  SAMD9L targeting guide sequence portion
gaaugauacacacaccugugu

SEQ ID NO: 2070 - RNA, 21 nt, Artificial Sequence
  SAMD9L targeting guide sequence portion
gagauacacagguguguguau

SEQ ID NO: 2071 - RNA, 21 nt, Artificial Sequence
  SAMD9L targeting guide sequence portion
gagggugaaugauacacacac

SEQ ID NO: 2072 - RNA, 21 nt, Artificial Sequence
  SAMD9L targeting guide sequence portion
gauacacacaccuguguaucu

SEQ ID NO: 2073 - RNA, 21 nt, Artificial Sequence
  SAMD9L targeting guide sequence portion
gauacacagguguguguauca

SEQ ID NO: 2074 - RNA, 21 nt, Artificial Sequence
  SAMD9L targeting guide sequence portion
gcaaucagagggugaaugaua

SEQ ID NO: 2075 - RNA, 21 nt, Artificial Sequence
  SAMD9L targeting guide sequence portion
ggagauacacaggugugugua

SEQ ID NO: 2076 - RNA, 21 nt, Artificial Sequence
  SAMD9L targeting guide sequence portion
ggcaaucagagggugaaugau

SEQ ID NO: 2077 - RNA, 21 nt, Artificial Sequence
  SAMD9L targeting guide sequence portion
gggagauacacaggugugugu

SEQ ID NO: 2078 - RNA, 21 nt, Artificial Sequence
  SAMD9L targeting guide sequence portion
gggcaaucagagggugaauga

SEQ ID NO: 2079 - RNA, 21 nt, Artificial Sequence
  SAMD9L targeting guide sequence portion
gggugaaugauacacacaccu

SEQ ID NO: 2080 - RNA, 21 nt, Artificial Sequence
  SAMD9L targeting guide sequence portion
ggugaaugauacacacaccug

SEQ ID NO: 2081 - RNA, 21 nt, Artificial Sequence
  SAMD9L targeting guide sequence portion
gguguguguaucauucacccu

SEQ ID NO: 2082 - RNA, 21 nt, Artificial Sequence
  SAMD9L targeting guide sequence portion
gugaaugauacacacaccugu

SEQ ID NO: 2083 - RNA, 21 nt, Artificial Sequence
  SAMD9L targeting guide sequence portion
guguaucauucacccucugau

SEQ ID NO: 2084 - RNA, 21 nt, Artificial Sequence
  SAMD9L targeting guide sequence portion
guguguaucauucacccucug

SEQ ID NO: 2085 - RNA, 21 nt, Artificial Sequence
  SAMD9L targeting guide sequence portion
guguguguaucauucacccuc

SEQ ID NO: 2086 - RNA, 21 nt, Artificial Sequence
  SAMD9L targeting guide sequence portion
uacacacaccuguguaucucc

SEQ ID NO: 2087 - RNA, 21 nt, Artificial Sequence
  SAMD9L targeting guide sequence portion
uacacagguguguguaucauu

SEQ ID NO: 2088 - RNA, 21 nt, Artificial Sequence
  SAMD9L targeting guide sequence portion
uaugggagauacacaggugug

SEQ ID NO: 2089 - RNA, 21 nt, Artificial Sequence
  SAMD9L targeting guide sequence portion
ucagagggugaaugauacaca

SEQ ID NO: 2090 - RNA, 21 nt, Artificial Sequence
  SAMD9L targeting guide sequence portion
ugaaugauacacacaccugug

SEQ ID NO: 2091 - RNA, 21 nt, Artificial Sequence
  SAMD9L targeting guide sequence portion
ugauacacacaccuguguauc

SEQ ID NO: 2092 - RNA, 21 nt, Artificial Sequence
  SAMD9L targeting guide sequence portion
ugggagauacacaggugugug

SEQ ID NO: 2093 - RNA, 21 nt, Artificial Sequence
  SAMD9L targeting guide sequence portion
uguaucauucacccucugauu

SEQ ID NO: 2094 - RNA, 21 nt, Artificial Sequence
  SAMD9L targeting guide sequence portion
uguguaucauucacccucuga

SEQ ID NO: 2095 - RNA, 21 nt, Artificial Sequence
  SAMD9L targeting guide sequence portion
uguguguaucauucacccucu

SEQ ID NO: 2096 - RNA, 22 nt, Artificial Sequence
  SAMD9L targeting guide sequence portion
aauaugggagauacacaggugu

SEQ ID NO: 2097 - RNA, 22 nt, Artificial Sequence
  SAMD9L targeting guide sequence portion
aaucagagggugaaugauacac

SEQ ID NO: 2098 - RNA, 22 nt, Artificial Sequence
  SAMD9L targeting guide sequence portion
aaugauacacacaccuguguau

SEQ ID NO: 2099 - RNA, 22 nt, Artificial Sequence
  SAMD9L targeting guide sequence portion
acacacaccuguguaucuccca

SEQ ID NO: 2100 - RNA, 22 nt, Artificial Sequence
  SAMD9L targeting guide sequence portion
acacaccuguguaucucccaua

SEQ ID NO: 2101 - RNA, 22 nt, Artificial Sequence
  SAMD9L targeting guide sequence portion
acacagguguguguaucauuca

SEQ ID NO: 2102 - RNA, 22 nt, Artificial Sequence
  SAMD9L targeting guide sequence portion
acagggcaaucagagggugaau

SEQ ID NO: 2103 - RNA, 22 nt, Artificial Sequence
  SAMD9L targeting guide sequence portion
acagguguguguaucauucacc

SEQ ID NO: 2104 - RNA, 22 nt, Artificial Sequence
  SAMD9L targeting guide sequence portion
agaauaugggagauacacaggu

SEQ ID NO: 2105 - RNA, 22 nt, Artificial Sequence
  SAMD9L targeting guide sequence portion
agagggugaaugauacacacac

SEQ ID NO: 2106 - RNA, 22 nt, Artificial Sequence
  SAMD9L targeting guide sequence portion
agauacacagguguguguauca

SEQ ID NO: 2107 - RNA, 22 nt, Artificial Sequence
  SAMD9L targeting guide sequence portion
agggcaaucagagggugaauga

SEQ ID NO: 2108 - RNA, 22 nt, Artificial Sequence
  SAMD9L targeting guide sequence portion
agggugaaugauacacacaccu

SEQ ID NO: 2109 - RNA, 22 nt, Artificial Sequence
  SAMD9L targeting guide sequence portion
agguguguguaucauucacccu

SEQ ID NO: 2110 - RNA, 22 nt, Artificial Sequence
  SAMD9L targeting guide sequence portion
auacacacaccuguguaucucc

SEQ ID NO: 2111 - RNA, 22 nt, Artificial Sequence
  SAMD9L targeting guide sequence portion
auacacagguguguguaucauu

SEQ ID NO: 2112 - RNA, 22 nt, Artificial Sequence
  SAMD9L targeting guide sequence portion
auaugggagauacacaggugug

SEQ ID NO: 2113 - RNA, 22 nt, Artificial Sequence
  SAMD9L targeting guide sequence portion
aucagagggugaaugauacaca

SEQ ID NO: 2114 - RNA, 22 nt, Artificial Sequence
  SAMD9L targeting guide sequence portion
augauacacacaccuguguauc

SEQ ID NO: 2115 - RNA, 22 nt, Artificial Sequence
  SAMD9L targeting guide sequence portion
augggagauacacaggugugug

SEQ ID NO: 2116 - RNA, 22 nt, Artificial Sequence
  SAMD9L targeting guide sequence portion
caaucagagggugaaugauaca

SEQ ID NO: 2117 - RNA, 22 nt, Artificial Sequence
  SAMD9L targeting guide sequence portion
cacacaccuguguaucucccau

SEQ ID NO: 2118 - RNA, 22 nt, Artificial Sequence
  SAMD9L targeting guide sequence portion
cacagguguguguaucauucac

SEQ ID NO: 2119 - RNA, 22 nt, Artificial Sequence
  SAMD9L targeting guide sequence portion
cagaauaugggagauacacagg

SEQ ID NO: 2120 - RNA, 22 nt, Artificial Sequence
  SAMD9L targeting guide sequence portion
cagagggugaaugauacacaca

SEQ ID NO: 2121 - RNA, 22 nt, Artificial Sequence
  SAMD9L targeting guide sequence portion
cagggcaaucagagggugaaug

SEQ ID NO: 2122 - RNA, 22 nt, Artificial Sequence
  SAMD9L targeting guide sequence portion
cagguguguguaucauucaccc

SEQ ID NO: 2123 - RNA, 22 nt, Artificial Sequence
  SAMD9L targeting guide sequence portion
gaauaugggagauacacaggug

SEQ ID NO: 2124 - RNA, 22 nt, Artificial Sequence
  SAMD9L targeting guide sequence portion
gaaugauacacacaccugugua

SEQ ID NO: 2125 - RNA, 22 nt, Artificial Sequence
  SAMD9L targeting guide sequence portion
gagauacacagguguguguauc

SEQ ID NO: 2126 - RNA, 22 nt, Artificial Sequence
  SAMD9L targeting guide sequence portion
gagggugaaugauacacacacc

SEQ ID NO: 2127 - RNA, 22 nt, Artificial Sequence
  SAMD9L targeting guide sequence portion
gauacacacaccuguguaucuc

SEQ ID NO: 2128 - RNA, 22 nt, Artificial Sequence
  SAMD9L targeting guide sequence portion
gauacacagguguguguaucau

SEQ ID NO: 2129 - RNA, 22 nt, Artificial Sequence
  SAMD9L targeting guide sequence portion
gcaaucagagggugaaugauac

SEQ ID NO: 2130 - RNA, 22 nt, Artificial Sequence
  SAMD9L targeting guide sequence portion
gcagaauaugggagauacacag

SEQ ID NO: 2131 - RNA, 22 nt, Artificial Sequence
  SAMD9L targeting guide sequence portion
ggagauacacagguguguguau

SEQ ID NO: 2132 - RNA, 22 nt, Artificial Sequence
  SAMD9L targeting guide sequence portion
ggcaaucagagggugaaugaua

SEQ ID NO: 2133 - RNA, 22 nt, Artificial Sequence
  SAMD9L targeting guide sequence portion
gggagauacacaggugugugua

SEQ ID NO: 2134 - RNA, 22 nt, Artificial Sequence
  SAMD9L targeting guide sequence portion
gggcaaucagagggugaaugau

SEQ ID NO: 2135 - RNA, 22 nt, Artificial Sequence
  SAMD9L targeting guide sequence portion
gggugaaugauacacacaccug

SEQ ID NO: 2136 - RNA, 22 nt, Artificial Sequence
  SAMD9L targeting guide sequence portion
ggugaaugauacacacaccugu

SEQ ID NO: 2137 - RNA, 22 nt, Artificial Sequence
  SAMD9L targeting guide sequence portion
gguguguguaucauucacccuc

SEQ ID NO: 2138 - RNA, 22 nt, Artificial Sequence
  SAMD9L targeting guide sequence portion
gugaaugauacacacaccugug

SEQ ID NO: 2139 - RNA, 22 nt, Artificial Sequence
  SAMD9L targeting guide sequence portion
guguaucauucacccucugauu

SEQ ID NO: 2140 - RNA, 22 nt, Artificial Sequence
  SAMD9L targeting guide sequence portion
guguguaucauucacccucuga

SEQ ID NO: 2141 - RNA, 22 nt, Artificial Sequence
  SAMD9L targeting guide sequence portion
guguguguaucauucacccucu

SEQ ID NO: 2142 - RNA, 22 nt, Artificial Sequence
  SAMD9L targeting guide sequence portion
uacacacaccuguguaucuccc

SEQ ID NO: 2143 - RNA, 22 nt, Artificial Sequence
  SAMD9L targeting guide sequence portion
uacacagguguguguaucauuc

SEQ ID NO: 2144 - RNA, 22 nt, Artificial Sequence
  SAMD9L targeting guide sequence portion
uaugggagauacacaggugugu

SEQ ID NO: 2145 - RNA, 22 nt, Artificial Sequence
  SAMD9L targeting guide sequence portion
ucagagggugaaugauacacac

SEQ ID NO: 2146 - RNA, 22 nt, Artificial Sequence
  SAMD9L targeting guide sequence portion
ugaaugauacacacaccugugu

SEQ ID NO: 2147 - RNA, 22 nt, Artificial Sequence
  SAMD9L targeting guide sequence portion
ugauacacacaccuguguaucu

SEQ ID NO: 2148 - RNA, 22 nt, Artificial Sequence
  SAMD9L targeting guide sequence portion
ugggagauacacaggugugugu

SEQ ID NO: 2149 - RNA, 22 nt, Artificial Sequence
  SAMD9L targeting guide sequence portion
uguaucauucacccucugauug

SEQ ID NO: 2150 - RNA, 22 nt, Artificial Sequence
  SAMD9L targeting guide sequence portion
uguguaucauucacccucugau

SEQ ID NO: 2151 - RNA, 22 nt, Artificial Sequence
  SAMD9L targeting guide sequence portion
uguguguaucauucacccucug

SEQ ID NO: 2152 - RNA, 20 nt, Artificial Sequence
  SAMD9L targeting guide sequence portion
aaugauacucacaccugugu

SEQ ID NO: 2153 - RNA, 20 nt, Artificial Sequence
  SAMD9L targeting guide sequence portion
acacaggugugaguaucauu

SEQ ID NO: 2154 - RNA, 20 nt, Artificial Sequence
  SAMD9L targeting guide sequence portion
acaggugugaguaucauuca

SEQ ID NO: 2155 - RNA, 20 nt, Artificial Sequence
  SAMD9L targeting guide sequence portion
acucacaccuguguaucucc

SEQ ID NO: 2156 - RNA, 20 nt, Artificial Sequence
  SAMD9L targeting guide sequence portion
agagggugaaugauacucac

SEQ ID NO: 2157 - RNA, 20 nt, Artificial Sequence
  SAMD9L targeting guide sequence portion
agauacacaggugugaguau

SEQ ID NO: 2158 - RNA, 20 nt, Artificial Sequence
  SAMD9L targeting guide sequence portion
agggugaaugauacucacac

SEQ ID NO: 2159 - RNA, 20 nt, Artificial Sequence
  SAMD9L targeting guide sequence portion
aggugugaguaucauucacc

SEQ ID NO: 2160 - RNA, 20 nt, Artificial Sequence
  SAMD9L targeting guide sequence portion
aguaucauucacccucugau

SEQ ID NO: 2161 - RNA, 20 nt, Artificial Sequence
  SAMD9L targeting guide sequence portion
auacacaggugugaguauca

SEQ ID NO: 2162 - RNA, 20 nt, Artificial Sequence
  SAMD9L targeting guide sequence portion
auacucacaccuguguaucu

SEQ ID NO: 2163 - RNA, 20 nt, Artificial Sequence
  SAMD9L targeting guide sequence portion
aucagagggugaaugauacu

SEQ ID NO: 2164 - RNA, 20 nt, Artificial Sequence
  SAMD9L targeting guide sequence portion
augauacucacaccugugua

SEQ ID NO: 2165 - RNA, 20 nt, Artificial Sequence
  SAMD9L targeting guide sequence portion
cacaggugugaguaucauuc

SEQ ID NO: 2166 - RNA, 20 nt, Artificial Sequence
  SAMD9L targeting guide sequence portion
cagagggugaaugauacuca

SEQ ID NO: 2167 - RNA, 20 nt, Artificial Sequence
  SAMD9L targeting guide sequence portion
caggugugaguaucauucac

SEQ ID NO: 2168 - RNA, 20 nt, Artificial Sequence
  SAMD9L targeting guide sequence portion
cucacaccuguguaucuccc

SEQ ID NO: 2169 - RNA, 20 nt, Artificial Sequence
  SAMD9L targeting guide sequence portion
gaaugauacucacaccugug

SEQ ID NO: 2170 - RNA, 20 nt, Artificial Sequence
  SAMD9L targeting guide sequence portion
gagauacacaggugugagua

SEQ ID NO: 2171 - RNA, 20 nt, Artificial Sequence
  SAMD9L targeting guide sequence portion
gagggugaaugauacucaca

SEQ ID NO: 2172 - RNA, 20 nt, Artificial Sequence
  SAMD9L targeting guide sequence portion
gaguaucauucacccucuga

SEQ ID NO: 2173 - RNA, 20 nt, Artificial Sequence
  SAMD9L targeting guide sequence portion
gauacacaggugugaguauc

SEQ ID NO: 2174 - RNA, 20 nt, Artificial Sequence
  SAMD9L targeting guide sequence portion
gauacucacaccuguguauc

SEQ ID NO: 2175 - RNA, 20 nt, Artificial Sequence
  SAMD9L targeting guide sequence portion
ggagauacacaggugugagu

SEQ ID NO: 2176 - RNA, 20 nt, Artificial Sequence
  SAMD9L targeting guide sequence portion
gggagauacacaggugugag

SEQ ID NO: 2177 - RNA, 20 nt, Artificial Sequence
  SAMD9L targeting guide sequence portion
gggugaaugauacucacacc

SEQ ID NO: 2178 - RNA, 20 nt, Artificial Sequence
  SAMD9L targeting guide sequence portion
ggugaaugauacucacaccu

SEQ ID NO: 2179 - RNA, 20 nt, Artificial Sequence
  SAMD9L targeting guide sequence portion
ggugugaguaucauucaccc

SEQ ID NO: 2180 - RNA, 20 nt, Artificial Sequence
  SAMD9L targeting guide sequence portion
gugaaugauacucacaccug

SEQ ID NO: 2181 - RNA, 20 nt, Artificial Sequence
  SAMD9L targeting guide sequence portion
gugaguaucauucacccucu

SEQ ID NO: 2182 - RNA, 20 nt, Artificial Sequence
  SAMD9L targeting guide sequence portion
gugugaguaucauucacccu

SEQ ID NO: 2183 - RNA, 20 nt, Artificial Sequence
  SAMD9L targeting guide sequence portion
uacacaggugugaguaucau

SEQ ID NO: 2184 - RNA, 20 nt, Artificial Sequence
  SAMD9L targeting guide sequence portion
uacucacaccuguguaucuc

SEQ ID NO: 2185 - RNA, 20 nt, Artificial Sequence
  SAMD9L targeting guide sequence portion
ucacaccuguguaucuccca

SEQ ID NO: 2186 - RNA, 20 nt, Artificial Sequence
  SAMD9L targeting guide sequence portion
ucagagggugaaugauacuc

SEQ ID NO: 2187 - RNA, 20 nt, Artificial Sequence
  SAMD9L targeting guide sequence portion
ugaaugauacucacaccugu

SEQ ID NO: 2188 - RNA, 20 nt, Artificial Sequence
  SAMD9L targeting guide sequence portion
ugaguaucauucacccucug

SEQ ID NO: 2189 - RNA, 20 nt, Artificial Sequence
  SAMD9L targeting guide sequence portion
ugauacucacaccuguguau

SEQ ID NO: 2190 - RNA, 20 nt, Artificial Sequence
  SAMD9L targeting guide sequence portion
ugggagauacacagguguga

SEQ ID NO: 2191 - RNA, 20 nt, Artificial Sequence
  SAMD9L targeting guide sequence portion
ugugaguaucauucacccuc

SEQ ID NO: 2192 - RNA, 21 nt, Artificial Sequence
  SAMD9L targeting guide sequence portion
aaucagagggugaaugauacu

SEQ ID NO: 2193 - RNA, 21 nt, Artificial Sequence
  SAMD9L targeting guide sequence portion
aaugauacucacaccugugua

SEQ ID NO: 2194 - RNA, 21 nt, Artificial Sequence
  SAMD9L targeting guide sequence portion
acacaggugugaguaucauuc

SEQ ID NO: 2195 - RNA, 21 nt, Artificial Sequence
  SAMD9L targeting guide sequence portion
acaggugugaguaucauucac

SEQ ID NO: 2196 - RNA, 21 nt, Artificial Sequence
  SAMD9L targeting guide sequence portion
acucacaccuguguaucuccc

SEQ ID NO: 2197 - RNA, 21 nt, Artificial Sequence
  SAMD9L targeting guide sequence portion
agagggugaaugauacucaca

SEQ ID NO: 2198 - RNA, 21 nt, Artificial Sequence
  SAMD9L targeting guide sequence portion
agauacacaggugugaguauc

SEQ ID NO: 2199 - RNA, 21 nt, Artificial Sequence
  SAMD9L targeting guide sequence portion
agggugaaugauacucacacc

SEQ ID NO: 2200 - RNA, 21 nt, Artificial Sequence
  SAMD9L targeting guide sequence portion
aggugugaguaucauucaccc

SEQ ID NO: 2201 - RNA, 21 nt, Artificial Sequence
  SAMD9L targeting guide sequence portion
aguaucauucacccucugauu

SEQ ID NO: 2202 - RNA, 21 nt, Artificial Sequence
  SAMD9L targeting guide sequence portion
auacacaggugugaguaucau

SEQ ID NO: 2203 - RNA, 21 nt, Artificial Sequence
  SAMD9L targeting guide sequence portion
auacucacaccuguguaucuc

SEQ ID NO: 2204 - RNA, 21 nt, Artificial Sequence
  SAMD9L targeting guide sequence portion
aucagagggugaaugauacuc

SEQ ID NO: 2205 - RNA, 21 nt, Artificial Sequence
  SAMD9L targeting guide sequence portion
augauacucacaccuguguau

SEQ ID NO: 2206 - RNA, 21 nt, Artificial Sequence
  SAMD9L targeting guide sequence portion
augggagauacacagguguga

SEQ ID NO: 2207 - RNA, 21 nt, Artificial Sequence
  SAMD9L targeting guide sequence portion
cacaggugugaguaucauuca

SEQ ID NO: 2208 - RNA, 21 nt, Artificial Sequence
  SAMD9L targeting guide sequence portion
cagagggugaaugauacucac

SEQ ID NO: 2209 - RNA, 21 nt, Artificial Sequence
  SAMD9L targeting guide sequence portion
caggugugaguaucauucacc

SEQ ID NO: 2210 - RNA, 21 nt, Artificial Sequence
  SAMD9L targeting guide sequence portion
cucacaccuguguaucuccca

SEQ ID NO: 2211 - RNA, 21 nt, Artificial Sequence
  SAMD9L targeting guide sequence portion
gaaugauacucacaccugugu

SEQ ID NO: 2212 - RNA, 21 nt, Artificial Sequence
  SAMD9L targeting guide sequence portion
gagauacacaggugugaguau

SEQ ID NO: 2213 - RNA, 21 nt, Artificial Sequence
  SAMD9L targeting guide sequence portion
gagggugaaugauacucacac

SEQ ID NO: 2214 - RNA, 21 nt, Artificial Sequence
  SAMD9L targeting guide sequence portion
gaguaucauucacccucugau

SEQ ID NO: 2215 - RNA, 21 nt, Artificial Sequence
  SAMD9L targeting guide sequence portion
gauacacaggugugaguauca

SEQ ID NO: 2216 - RNA, 21 nt, Artificial Sequence
  SAMD9L targeting guide sequence portion
gauacucacaccuguguaucu

SEQ ID NO: 2217 - RNA, 21 nt, Artificial Sequence
  SAMD9L targeting guide sequence portion
ggagauacacaggugugagua

SEQ ID NO: 2218 - RNA, 21 nt, Artificial Sequence
  SAMD9L targeting guide sequence portion
gggagauacacaggugugagu

SEQ ID NO: 2219 - RNA, 21 nt, Artificial Sequence
  SAMD9L targeting guide sequence portion
gggugaaugauacucacaccu

SEQ ID NO: 2220 - RNA, 21 nt, Artificial Sequence
  SAMD9L targeting guide sequence portion
ggugaaugauacucacaccug

SEQ ID NO: 2221 - RNA, 21 nt, Artificial Sequence
  SAMD9L targeting guide sequence portion
ggugugaguaucauucacccu

SEQ ID NO: 2222 - RNA, 21 nt, Artificial Sequence
  SAMD9L targeting guide sequence portion
gugaaugauacucacaccugu

SEQ ID NO: 2223 - RNA, 21 nt, Artificial Sequence
  SAMD9L targeting guide sequence portion
gugaguaucauucacccucug

SEQ ID NO: 2224 - RNA, 21 nt, Artificial Sequence
  SAMD9L targeting guide sequence portion
gugugaguaucauucacccuc

SEQ ID NO: 2225 - RNA, 21 nt, Artificial Sequence
  SAMD9L targeting guide sequence portion
uacacaggugugaguaucauu

SEQ ID NO: 2226 - RNA, 21 nt, Artificial Sequence
  SAMD9L targeting guide sequence portion
uacucacaccuguguaucucc

SEQ ID NO: 2227 - RNA, 21 nt, Artificial Sequence
  SAMD9L targeting guide sequence portion
ucacaccuguguaucucccau

SEQ ID NO: 2228 - RNA, 21 nt, Artificial Sequence
  SAMD9L targeting guide sequence portion
ucagagggugaaugauacuca

SEQ ID NO: 2229 - RNA, 21 nt, Artificial Sequence
  SAMD9L targeting guide sequence portion
ugaaugauacucacaccugug

SEQ ID NO: 2230 - RNA, 21 nt, Artificial Sequence
  SAMD9L targeting guide sequence portion
ugaguaucauucacccucuga

SEQ ID NO: 2231 - RNA, 21 nt, Artificial Sequence
  SAMD9L targeting guide sequence portion
ugauacucacaccuguguauc

SEQ ID NO: 2232 - RNA, 21 nt, Artificial Sequence
  SAMD9L targeting guide sequence portion
ugggagauacacaggugugag

SEQ ID NO: 2233 - RNA, 21 nt, Artificial Sequence
  SAMD9L targeting guide sequence portion
ugugaguaucauucacccucu

SEQ ID NO: 2234 - RNA, 22 nt, Artificial Sequence
  SAMD9L targeting guide sequence portion
aaucagagggugaaugauacuc

SEQ ID NO: 2235 - RNA, 22 nt, Artificial Sequence
  SAMD9L targeting guide sequence portion
aaugauacucacaccuguguau

SEQ ID NO: 2236 - RNA, 22 nt, Artificial Sequence
  SAMD9L targeting guide sequence portion
acacaggugugaguaucauuca

SEQ ID NO: 2237 - RNA, 22 nt, Artificial Sequence
  SAMD9L targeting guide sequence portion
acaggugugaguaucauucacc

SEQ ID NO: 2238 - RNA, 22 nt, Artificial Sequence
  SAMD9L targeting guide sequence portion
acucacaccuguguaucuccca

SEQ ID NO: 2239 - RNA, 22 nt, Artificial Sequence
  SAMD9L targeting guide sequence portion
agagggugaaugauacucacac

SEQ ID NO: 2240 - RNA, 22 nt, Artificial Sequence
  SAMD9L targeting guide sequence portion
agauacacaggugugaguauca

SEQ ID NO: 2241 - RNA, 22 nt, Artificial Sequence
  SAMD9L targeting guide sequence portion
agggugaaugauacucacaccu

SEQ ID NO: 2242 - RNA, 22 nt, Artificial Sequence
  SAMD9L targeting guide sequence portion
aggugugaguaucauucacccu

SEQ ID NO: 2243 - RNA, 22 nt, Artificial Sequence
  SAMD9L targeting guide sequence portion
aguaucauucacccucugauug

SEQ ID NO: 2244 - RNA, 22 nt, Artificial Sequence
  SAMD9L targeting guide sequence portion
auacacaggugugaguaucauu

SEQ ID NO: 2245 - RNA, 22 nt, Artificial Sequence
  SAMD9L targeting guide sequence portion
auacucacaccuguguaucucc

SEQ ID NO: 2246 - RNA, 22 nt, Artificial Sequence
  SAMD9L targeting guide sequence portion
aucagagggugaaugauacuca

SEQ ID NO: 2247 - RNA, 22 nt, Artificial Sequence
  SAMD9L targeting guide sequence portion
augauacucacaccuguguauc

SEQ ID NO: 2248 - RNA, 22 nt, Artificial Sequence
  SAMD9L targeting guide sequence portion
augggagauacacaggugugag

SEQ ID NO: 2249 - RNA, 22 nt, Artificial Sequence
  SAMD9L targeting guide sequence portion
caaucagagggugaaugauacu

SEQ ID NO: 2250 - RNA, 22 nt, Artificial Sequence
  SAMD9L targeting guide sequence portion
cacaggugugaguaucauucac

SEQ ID NO: 2251 - RNA, 22 nt, Artificial Sequence
  SAMD9L targeting guide sequence portion
cagagggugaaugauacucaca

SEQ ID NO: 2252 - RNA, 22 nt, Artificial Sequence
  SAMD9L targeting guide sequence portion
caggugugaguaucauucaccc

SEQ ID NO: 2253 - RNA, 22 nt, Artificial Sequence
  SAMD9L targeting guide sequence portion
cucacaccuguguaucucccau

SEQ ID NO: 2254 - RNA, 22 nt, Artificial Sequence
  SAMD9L targeting guide sequence portion
gaaugauacucacaccugugua

SEQ ID NO: 2255 - RNA, 22 nt, Artificial Sequence
  SAMD9L targeting guide sequence portion
gagauacacaggugugaguauc

SEQ ID NO: 2256 - RNA, 22 nt, Artificial Sequence
  SAMD9L targeting guide sequence portion
gagggugaaugauacucacacc

SEQ ID NO: 2257 - RNA, 22 nt, Artificial Sequence
  SAMD9L targeting guide sequence portion
gaguaucauucacccucugauu

SEQ ID NO: 2258 - RNA, 22 nt, Artificial Sequence
  SAMD9L targeting guide sequence portion
gauacacaggugugaguaucau

SEQ ID NO: 2259 - RNA, 22 nt, Artificial Sequence
  SAMD9L targeting guide sequence portion
gauacucacaccuguguaucuc

SEQ ID NO: 2260 - RNA, 22 nt, Artificial Sequence
  SAMD9L targeting guide sequence portion
ggagauacacaggugugaguau

SEQ ID NO: 2261 - RNA, 22 nt, Artificial Sequence
  SAMD9L targeting guide sequence portion
gggagauacacaggugugagua

SEQ ID NO: 2262 - RNA, 22 nt, Artificial Sequence
  SAMD9L targeting guide sequence portion
gggugaaugauacucacaccug

SEQ ID NO: 2263 - RNA, 22 nt, Artificial Sequence
  SAMD9L targeting guide sequence portion
ggugaaugauacucacaccugu

SEQ ID NO: 2264 - RNA, 22 nt, Artificial Sequence
  SAMD9L targeting guide sequence portion
ggugugaguaucauucacccuc

SEQ ID NO: 2265 - RNA, 22 nt, Artificial Sequence
  SAMD9L targeting guide sequence portion
gugaaugauacucacaccugug

SEQ ID NO: 2266 - RNA, 22 nt, Artificial Sequence
  SAMD9L targeting guide sequence portion
gugaguaucauucacccucuga

SEQ ID NO: 2267 - RNA, 22 nt, Artificial Sequence
  SAMD9L targeting guide sequence portion
gugugaguaucauucacccucu

SEQ ID NO: 2268 - RNA, 22 nt, Artificial Sequence
  SAMD9L targeting guide sequence portion
uacacaggugugaguaucauuc

SEQ ID NO: 2269 - RNA, 22 nt, Artificial Sequence
  SAMD9L targeting guide sequence portion
uacucacaccuguguaucuccc

SEQ ID NO: 2270 - RNA, 22 nt, Artificial Sequence
  SAMD9L targeting guide sequence portion
uaugggagauacacagguguga

SEQ ID NO: 2271 - RNA, 22 nt, Artificial Sequence
  SAMD9L targeting guide sequence portion
ucacaccuguguaucucccaua

SEQ ID NO: 2272 - RNA, 22 nt, Artificial Sequence
  SAMD9L targeting guide sequence portion
ucagagggugaaugauacucac

SEQ ID NO: 2273 - RNA, 22 nt, Artificial Sequence
  SAMD9L targeting guide sequence portion
ugaaugauacucacaccugugu

SEQ ID NO: 2274 - RNA, 22 nt, Artificial Sequence
  SAMD9L targeting guide sequence portion
ugaguaucauucacccucugau

SEQ ID NO: 2275 - RNA, 22 nt, Artificial Sequence
  SAMD9L targeting guide sequence portion
ugauacucacaccuguguaucu

SEQ ID NO: 2276 - RNA, 22 nt, Artificial Sequence
  SAMD9L targeting guide sequence portion
ugggagauacacaggugugagu

SEQ ID NO: 2277 - RNA, 22 nt, Artificial Sequence
  SAMD9L targeting guide sequence portion
ugugaguaucauucacccucug

SEQ ID NO: 2278 - RNA, 20 nt, Artificial Sequence
  SAMD9L targeting guide sequence portion
aaaacuuuuauuccuucaug

SEQ ID NO: 2279 - RNA, 20 nt, Artificial Sequence
  SAMD9L targeting guide sequence portion
aaaauugcuuuucaugguca

SEQ ID NO: 2280 - RNA, 20 nt, Artificial Sequence
  SAMD9L targeting guide sequence portion
aaacuuuuauuccuucauga

SEQ ID NO: 2281 - RNA, 20 nt, Artificial Sequence
  SAMD9L targeting guide sequence portion
aaauugcuuuucauggucau

SEQ ID NO: 2282 - RNA, 20 nt, Artificial Sequence
  SAMD9L targeting guide sequence portion
aacuuuuauuccuucaugac

SEQ ID NO: 2283 - RNA, 20 nt, Artificial Sequence
  SAMD9L targeting guide sequence portion
aauugcuuuucauggucaug

SEQ ID NO: 2284 - RNA, 20 nt, Artificial Sequence
  SAMD9L targeting guide sequence portion
accaugaaaagcaauuuuga

SEQ ID NO: 2285 - RNA, 20 nt, Artificial Sequence
  SAMD9L targeting guide sequence portion
acuuuuauuccuucaugacc

SEQ ID NO: 2286 - RNA, 20 nt, Artificial Sequence
  SAMD9L targeting guide sequence portion
aucaaaauugcuuuucaugg

SEQ ID NO: 2287 - RNA, 20 nt, Artificial Sequence
  SAMD9L targeting guide sequence portion
augaccaugaaaagcaauuu

SEQ ID NO: 2288 - RNA, 20 nt, Artificial Sequence
  SAMD9L targeting guide sequence portion
auggucaugaaggaauaaaa

SEQ ID NO: 2289 - RNA, 20 nt, Artificial Sequence
  SAMD9L targeting guide sequence portion
auuccuucaugaccaugaaa

SEQ ID NO: 2290 - RNA, 20 nt, Artificial Sequence
  SAMD9L targeting guide sequence portion
auugcuuuucauggucauga

SEQ ID NO: 2291 - RNA, 20 nt, Artificial Sequence
  SAMD9L targeting guide sequence portion
caaaauugcuuuucaugguc

SEQ ID NO: 2292 - RNA, 20 nt, Artificial Sequence
  SAMD9L targeting guide sequence portion
caucaaaauugcuuuucaug

SEQ ID NO: 2293 - RNA, 20 nt, Artificial Sequence
  SAMD9L targeting guide sequence portion
caugaccaugaaaagcaauu

SEQ ID NO: 2294 - RNA, 20 nt, Artificial Sequence
  SAMD9L targeting guide sequence portion
cauggucaugaaggaauaaa

SEQ ID NO: 2295 - RNA, 20 nt, Artificial Sequence
  SAMD9L targeting guide sequence portion
ccaugaaaagcaauuuugau

SEQ ID NO: 2296 - RNA, 20 nt, Artificial Sequence
  SAMD9L targeting guide sequence portion
ccuucaugaccaugaaaagc

SEQ ID NO: 2297 - RNA, 20 nt, Artificial Sequence
  SAMD9L targeting guide sequence portion
cuucaugaccaugaaaagca

SEQ ID NO: 2298 - RNA, 20 nt, Artificial Sequence
  SAMD9L targeting guide sequence portion
cuuuuauuccuucaugacca

SEQ ID NO: 2299 - RNA, 20 nt, Artificial Sequence
  SAMD9L targeting guide sequence portion
cuuuucauggucaugaagga

SEQ ID NO: 2300 - RNA, 20 nt, Artificial Sequence
  SAMD9L targeting guide sequence portion
gaaaacuuuuauuccuucau

SEQ ID NO: 2301 - RNA, 20 nt, Artificial Sequence
  SAMD9L targeting guide sequence portion
gaccaugaaaagcaauuuug

SEQ ID NO: 2302 - RNA, 20 nt, Artificial Sequence
  SAMD9L targeting guide sequence portion
gcuuuucauggucaugaagg

SEQ ID NO: 2303 - RNA, 20 nt, Artificial Sequence
  SAMD9L targeting guide sequence portion
ggucaugaaggaauaaaagu

SEQ ID NO: 2304 - RNA, 20 nt, Artificial Sequence
  SAMD9L targeting guide sequence portion
gucaugaaggaauaaaaguu

SEQ ID NO: 2305 - RNA, 20 nt, Artificial Sequence
  SAMD9L targeting guide sequence portion
gugaaaacuuuuauuccuuc

SEQ ID NO: 2306 - RNA, 20 nt, Artificial Sequence
  SAMD9L targeting guide sequence portion
guuucaucaaaauugcuuuu

SEQ ID NO: 2307 - RNA, 20 nt, Artificial Sequence
  SAMD9L targeting guide sequence portion
uauuccuucaugaccaugaa

SEQ ID NO: 2308 - RNA, 20 nt, Artificial Sequence
  SAMD9L targeting guide sequence portion
ucaaaauugcuuuucauggu

SEQ ID NO: 2309 - RNA, 20 nt, Artificial Sequence
  SAMD9L targeting guide sequence portion
ucaucaaaauugcuuuucau

SEQ ID NO: 2310 - RNA, 20 nt, Artificial Sequence
  SAMD9L targeting guide sequence portion
ucaugaccaugaaaagcaau

SEQ ID NO: 2311 - RNA, 20 nt, Artificial Sequence
  SAMD9L targeting guide sequence portion
ucauggucaugaaggaauaa

SEQ ID NO: 2312 - RNA, 20 nt, Artificial Sequence
  SAMD9L targeting guide sequence portion
uccuucaugaccaugaaaag

SEQ ID NO: 2313 - RNA, 20 nt, Artificial Sequence
  SAMD9L targeting guide sequence portion
ugaaaacuuuuauuccuuca

SEQ ID NO: 2314 - RNA, 20 nt, Artificial Sequence
  SAMD9L targeting guide sequence portion
ugaccaugaaaagcaauuuu

SEQ ID NO: 2315 - RNA, 20 nt, Artificial Sequence
  SAMD9L targeting guide sequence portion
ugcuuuucauggucaugaag

SEQ ID NO: 2316 - RNA, 20 nt, Artificial Sequence
  SAMD9L targeting guide sequence portion
uggucaugaaggaauaaaag

SEQ ID NO: 2317 - RNA, 20 nt, Artificial Sequence
  SAMD9L targeting guide sequence portion
ugugaaaacuuuuauuccuu

SEQ ID NO: 2318 - RNA, 20 nt, Artificial Sequence
  SAMD9L targeting guide sequence portion
uguuucaucaaaauugcuuu

SEQ ID NO: 2319 - RNA, 20 nt, Artificial Sequence
  SAMD9L targeting guide sequence portion
uuauuccuucaugaccauga

SEQ ID NO: 2320 - RNA, 20 nt, Artificial Sequence
  SAMD9L targeting guide sequence portion
uucaucaaaauugcuuuuca

SEQ ID NO: 2321 - RNA, 20 nt, Artificial Sequence
  SAMD9L targeting guide sequence portion
uucaugaccaugaaaagcaa

SEQ ID NO: 2322 - RNA, 20 nt, Artificial Sequence
  SAMD9L targeting guide sequence portion
uucauggucaugaaggaaua

SEQ ID NO: 2323 - RNA, 20 nt, Artificial Sequence
  SAMD9L targeting guide sequence portion
uuccuucaugaccaugaaaa

SEQ ID NO: 2324 - RNA, 20 nt, Artificial Sequence
  SAMD9L targeting guide sequence portion
uugcuuuucauggucaugaa

SEQ ID NO: 2325 - RNA, 20 nt, Artificial Sequence
  SAMD9L targeting guide sequence portion
uuuauuccuucaugaccaug

SEQ ID NO: 2326 - RNA, 20 nt, Artificial Sequence
  SAMD9L targeting guide sequence portion
uuucaucaaaauugcuuuuc

SEQ ID NO: 2327 - RNA, 20 nt, Artificial Sequence
  SAMD9L targeting guide sequence portion
uuucauggucaugaaggaau

SEQ ID NO: 2328 - RNA, 20 nt, Artificial Sequence
  SAMD9L targeting guide sequence portion
uuuuauuccuucaugaccau

SEQ ID NO: 2329 - RNA, 20 nt, Artificial Sequence
  SAMD9L targeting guide sequence portion
uuuucauggucaugaaggaa

SEQ ID NO: 2330 - RNA, 21 nt, Artificial Sequence
  SAMD9L targeting guide sequence portion
aaaacuuuuauuccuucauga

SEQ ID NO: 2331 - RNA, 21 nt, Artificial Sequence
  SAMD9L targeting guide sequence portion
aaaauugcuuuucauggucau

SEQ ID NO: 2332 - RNA, 21 nt, Artificial Sequence
  SAMD9L targeting guide sequence portion
aaacuuuuauuccuucaugac

SEQ ID NO: 2333 - RNA, 21 nt, Artificial Sequence
  SAMD9L targeting guide sequence portion
aaauugcuuuucauggucaug

SEQ ID NO: 2334 - RNA, 21 nt, Artificial Sequence
  SAMD9L targeting guide sequence portion
aacuuuuauuccuucaugacc

SEQ ID NO: 2335 - RNA, 21 nt, Artificial Sequence
  SAMD9L targeting guide sequence portion
aauugcuuuucauggucauga

SEQ ID NO: 2336 - RNA, 21 nt, Artificial Sequence
  SAMD9L targeting guide sequence portion
accaugaaaagcaauuuugau

SEQ ID NO: 2337 - RNA, 21 nt, Artificial Sequence
  SAMD9L targeting guide sequence portion
acuuuuauuccuucaugacca

SEQ ID NO: 2338 - RNA, 21 nt, Artificial Sequence
  SAMD9L targeting guide sequence portion
aucaaaauugcuuuucauggu

SEQ ID NO: 2339 - RNA, 21 nt, Artificial Sequence
  SAMD9L targeting guide sequence portion
augaccaugaaaagcaauuuu

SEQ ID NO: 2340 - RNA, 21 nt, Artificial Sequence
  SAMD9L targeting guide sequence portion
auggucaugaaggaauaaaag

SEQ ID NO: 2341 - RNA, 21 nt, Artificial Sequence
  SAMD9L targeting guide sequence portion
auguuucaucaaaauugcuuu

SEQ ID NO: 2342 - RNA, 21 nt, Artificial Sequence
  SAMD9L targeting guide sequence portion
auuccuucaugaccaugaaaa

SEQ ID NO: 2343 - RNA, 21 nt, Artificial Sequence
  SAMD9L targeting guide sequence portion
auugcuuuucauggucaugaa

SEQ ID NO: 2344 - RNA, 21 nt, Artificial Sequence
  SAMD9L targeting guide sequence portion
caaaauugcuuuucaugguca

SEQ ID NO: 2345 - RNA, 21 nt, Artificial Sequence
  SAMD9L targeting guide sequence portion
caucaaaauugcuuuucaugg

SEQ ID NO: 2346 - RNA, 21 nt, Artificial Sequence
  SAMD9L targeting guide sequence portion
caugaccaugaaaagcaauuu

SEQ ID NO: 2347 - RNA, 21 nt, Artificial Sequence
  SAMD9L targeting guide sequence portion
cauggucaugaaggaauaaaa

SEQ ID NO: 2348 - RNA, 21 nt, Artificial Sequence
  SAMD9L targeting guide sequence portion
ccaugaaaagcaauuuugaug

SEQ ID NO: 2349 - RNA, 21 nt, Artificial Sequence
  SAMD9L targeting guide sequence portion
ccuucaugaccaugaaaagca

SEQ ID NO: 2350 - RNA, 21 nt, Artificial Sequence
  SAMD9L targeting guide sequence portion
cugugaaaacuuuuauuccuu

SEQ ID NO: 2351 - RNA, 21 nt, Artificial Sequence
  SAMD9L targeting guide sequence portion
cuucaugaccaugaaaagcaa

SEQ ID NO: 2352 - RNA, 21 nt, Artificial Sequence
  SAMD9L targeting guide sequence portion
cuuuuauuccuucaugaccau

SEQ ID NO: 2353 - RNA, 21 nt, Artificial Sequence
  SAMD9L targeting guide sequence portion
cuuuucauggucaugaaggaa

SEQ ID NO: 2354 - RNA, 21 nt, Artificial Sequence
  SAMD9L targeting guide sequence portion
gaaaacuuuuauuccuucaug

SEQ ID NO: 2355 - RNA, 21 nt, Artificial Sequence
  SAMD9L targeting guide sequence portion
gaccaugaaaagcaauuuuga

SEQ ID NO: 2356 - RNA, 21 nt, Artificial Sequence
  SAMD9L targeting guide sequence portion
gcuuuucauggucaugaagga

SEQ ID NO: 2357 - RNA, 21 nt, Artificial Sequence
  SAMD9L targeting guide sequence portion
ggucaugaaggaauaaaaguu

SEQ ID NO: 2358 - RNA, 21 nt, Artificial Sequence
  SAMD9L targeting guide sequence portion
gucaugaaggaauaaaaguuu

SEQ ID NO: 2359 - RNA, 21 nt, Artificial Sequence
  SAMD9L targeting guide sequence portion
gugaaaacuuuuauuccuuca

SEQ ID NO: 2360 - RNA, 21 nt, Artificial Sequence
  SAMD9L targeting guide sequence portion
guuucaucaaaauugcuuuuc

SEQ ID NO: 2361 - RNA, 21 nt, Artificial Sequence
  SAMD9L targeting guide sequence portion
uauuccuucaugaccaugaaa

SEQ ID NO: 2362 - RNA, 21 nt, Artificial Sequence
  SAMD9L targeting guide sequence portion
ucaaaauugcuuuucaugguc

SEQ ID NO: 2363 - RNA, 21 nt, Artificial Sequence
  SAMD9L targeting guide sequence portion
ucaucaaaauugcuuuucaug

SEQ ID NO: 2364 - RNA, 21 nt, Artificial Sequence
  SAMD9L targeting guide sequence portion
ucaugaccaugaaaagcaauu

SEQ ID NO: 2365 - RNA, 21 nt, Artificial Sequence
  SAMD9L targeting guide sequence portion
ucauggucaugaaggaauaaa

SEQ ID NO: 2366 - RNA, 21 nt, Artificial Sequence
  SAMD9L targeting guide sequence portion
uccuucaugaccaugaaaagc

SEQ ID NO: 2367 - RNA, 21 nt, Artificial Sequence
  SAMD9L targeting guide sequence portion
ugaaaacuuuuauuccuucau

SEQ ID NO: 2368 - RNA, 21 nt, Artificial Sequence
  SAMD9L targeting guide sequence portion
ugaccaugaaaagcaauuuug

SEQ ID NO: 2369 - RNA, 21 nt, Artificial Sequence
  SAMD9L targeting guide sequence portion
ugcuuuucauggucaugaagg

SEQ ID NO: 2370 - RNA, 21 nt, Artificial Sequence
  SAMD9L targeting guide sequence portion
uggucaugaaggaauaaaagu

SEQ ID NO: 2371 - RNA, 21 nt, Artificial Sequence
  SAMD9L targeting guide sequence portion
ugugaaaacuuuuauuccuuc

SEQ ID NO: 2372 - RNA, 21 nt, Artificial Sequence
  SAMD9L targeting guide sequence portion
uguuucaucaaaauugcuuuu

SEQ ID NO: 2373 - RNA, 21 nt, Artificial Sequence
  SAMD9L targeting guide sequence portion
uuauuccuucaugaccaugaa

SEQ ID NO: 2374 - RNA, 21 nt, Artificial Sequence
  SAMD9L targeting guide sequence portion
uucaucaaaauugcuuuucau

SEQ ID NO: 2375 - RNA, 21 nt, Artificial Sequence
  SAMD9L targeting guide sequence portion
uucaugaccaugaaaagcaau

SEQ ID NO: 2376 - RNA, 21 nt, Artificial Sequence
  SAMD9L targeting guide sequence portion
uucauggucaugaaggaauaa

SEQ ID NO: 2377 - RNA, 21 nt, Artificial Sequence
  SAMD9L targeting guide sequence portion
uuccuucaugaccaugaaaag

SEQ ID NO: 2378 - RNA, 21 nt, Artificial Sequence
  SAMD9L targeting guide sequence portion
uugcuuuucauggucaugaag

SEQ ID NO: 2379 - RNA, 21 nt, Artificial Sequence
  SAMD9L targeting guide sequence portion
uuuauuccuucaugaccauga

SEQ ID NO: 2380 - RNA, 21 nt, Artificial Sequence
  SAMD9L targeting guide sequence portion
uuucaucaaaauugcuuuuca

SEQ ID NO: 2381 - RNA, 21 nt, Artificial Sequence
  SAMD9L targeting guide sequence portion
uuucauggucaugaaggaaua

SEQ ID NO: 2382 - RNA, 21 nt, Artificial Sequence
  SAMD9L targeting guide sequence portion
uuuuauuccuucaugaccaug

SEQ ID NO: 2383 - RNA, 21 nt, Artificial Sequence
  SAMD9L targeting guide sequence portion
uuuucauggucaugaaggaau

SEQ ID NO: 2384 - RNA, 22 nt, Artificial Sequence
  SAMD9L targeting guide sequence portion
aaaacuuuuauuccuucaugac

SEQ ID NO: 2385 - RNA, 22 nt, Artificial Sequence
  SAMD9L targeting guide sequence portion
aaaauugcuuuucauggucaug

SEQ ID NO: 2386 - RNA, 22 nt, Artificial Sequence
  SAMD9L targeting guide sequence portion
aaacuuuuauuccuucaugacc

SEQ ID NO: 2387 - RNA, 22 nt, Artificial Sequence
  SAMD9L targeting guide sequence portion
aaauugcuuuucauggucauga

SEQ ID NO: 2388 - RNA, 22 nt, Artificial Sequence
  SAMD9L targeting guide sequence portion
aacuuuuauuccuucaugacca

SEQ ID NO: 2389 - RNA, 22 nt, Artificial Sequence
  SAMD9L targeting guide sequence portion
aauugcuuuucauggucaugaa

SEQ ID NO: 2390 - RNA, 22 nt, Artificial Sequence
  SAMD9L targeting guide sequence portion
accaugaaaagcaauuuugaug

SEQ ID NO: 2391 - RNA, 22 nt, Artificial Sequence
  SAMD9L targeting guide sequence portion
acugugaaaacuuuuauuccuu

SEQ ID NO: 2392 - RNA, 22 nt, Artificial Sequence
  SAMD9L targeting guide sequence portion
acuuuuauuccuucaugaccau

SEQ ID NO: 2393 - RNA, 22 nt, Artificial Sequence
  SAMD9L targeting guide sequence portion
aucaaaauugcuuuucaugguc

SEQ ID NO: 2394 - RNA, 22 nt, Artificial Sequence
  SAMD9L targeting guide sequence portion
augaccaugaaaagcaauuuug

SEQ ID NO: 2395 - RNA, 22 nt, Artificial Sequence
  SAMD9L targeting guide sequence portion
auggucaugaaggaauaaaagu

SEQ ID NO: 2396 - RNA, 22 nt, Artificial Sequence
  SAMD9L targeting guide sequence portion
auguuucaucaaaauugcuuuu

SEQ ID NO: 2397 - RNA, 22 nt, Artificial Sequence
  SAMD9L targeting guide sequence portion
auuccuucaugaccaugaaaag

SEQ ID NO: 2398 - RNA, 22 nt, Artificial Sequence
  SAMD9L targeting guide sequence portion
auugcuuuucauggucaugaag

SEQ ID NO: 2399 - RNA, 22 nt, Artificial Sequence
  SAMD9L targeting guide sequence portion
caaaauugcuuuucauggucau

SEQ ID NO: 2400 - RNA, 22 nt, Artificial Sequence
  SAMD9L targeting guide sequence portion
caucaaaauugcuuuucauggu

SEQ ID NO: 2401 - RNA, 22 nt, Artificial Sequence
  SAMD9L targeting guide sequence portion
caugaccaugaaaagcaauuuu

SEQ ID NO: 2402 - RNA, 22 nt, Artificial Sequence
  SAMD9L targeting guide sequence portion
cauggucaugaaggaauaaaag

SEQ ID NO: 2403 - RNA, 22 nt, Artificial Sequence
  SAMD9L targeting guide sequence portion
ccaugaaaagcaauuuugauga

SEQ ID NO: 2404 - RNA, 22 nt, Artificial Sequence
  SAMD9L targeting guide sequence portion
ccuucaugaccaugaaaagcaa

SEQ ID NO: 2405 - RNA, 22 nt, Artificial Sequence
  SAMD9L targeting guide sequence portion
cugugaaaacuuuuauuccuuc

SEQ ID NO: 2406 - RNA, 22 nt, Artificial Sequence
  SAMD9L targeting guide sequence portion
cuucaugaccaugaaaagcaau

SEQ ID NO: 2407 - RNA, 22 nt, Artificial Sequence
  SAMD9L targeting guide sequence portion
cuuuuauuccuucaugaccaug

SEQ ID NO: 2408 - RNA, 22 nt, Artificial Sequence
  SAMD9L targeting guide sequence portion
cuuuucauggucaugaaggaau

SEQ ID NO: 2409 - RNA, 22 nt, Artificial Sequence
  SAMD9L targeting guide sequence portion
gaaaacuuuuauuccuucauga

SEQ ID NO: 2410 - RNA, 22 nt, Artificial Sequence
  SAMD9L targeting guide sequence portion
gaccaugaaaagcaauuuugau

SEQ ID NO: 2411 - RNA, 22 nt, Artificial Sequence
  SAMD9L targeting guide sequence portion
gcuuuucauggucaugaaggaa

SEQ ID NO: 2412 - RNA, 22 nt, Artificial Sequence
  SAMD9L targeting guide sequence portion
ggucaugaaggaauaaaaguuu

SEQ ID NO: 2413 - RNA, 22 nt, Artificial Sequence
  SAMD9L targeting guide sequence portion
gucaugaaggaauaaaaguuuu

SEQ ID NO: 2414 - RNA, 22 nt, Artificial Sequence
  SAMD9L targeting guide sequence portion
gugaaaacuuuuauuccuucau

SEQ ID NO: 2415 - RNA, 22 nt, Artificial Sequence
  SAMD9L targeting guide sequence portion
guuucaucaaaauugcuuuuca

SEQ ID NO: 2416 - RNA, 22 nt, Artificial Sequence
  SAMD9L targeting guide sequence portion
uauguuucaucaaaauugcuuu

SEQ ID NO: 2417 - RNA, 22 nt, Artificial Sequence
  SAMD9L targeting guide sequence portion
uauuccuucaugaccaugaaaa

SEQ ID NO: 2418 - RNA, 22 nt, Artificial Sequence
  SAMD9L targeting guide sequence portion
ucaaaauugcuuuucaugguca

SEQ ID NO: 2419 - RNA, 22 nt, Artificial Sequence
  SAMD9L targeting guide sequence portion
ucaucaaaauugcuuuucaugg

SEQ ID NO: 2420 - RNA, 22 nt, Artificial Sequence
  SAMD9L targeting guide sequence portion
ucaugaccaugaaaagcaauuu

SEQ ID NO: 2421 - RNA, 22 nt, Artificial Sequence
  SAMD9L targeting guide sequence portion
ucauggucaugaaggaauaaaa

SEQ ID NO: 2422 - RNA, 22 nt, Artificial Sequence
  SAMD9L targeting guide sequence portion
uccuucaugaccaugaaaagca

SEQ ID NO: 2423 - RNA, 22 nt, Artificial Sequence
  SAMD9L targeting guide sequence portion
ugaaaacuuuuauuccuucaug

SEQ ID NO: 2424 - RNA, 22 nt, Artificial Sequence
  SAMD9L targeting guide sequence portion
ugaccaugaaaagcaauuuuga

SEQ ID NO: 2425 - RNA, 22 nt, Artificial Sequence
  SAMD9L targeting guide sequence portion
ugcuuuucauggucaugaagga

SEQ ID NO: 2426 - RNA, 22 nt, Artificial Sequence
  SAMD9L targeting guide sequence portion
uggucaugaaggaauaaaaguu

SEQ ID NO: 2427 - RNA, 22 nt, Artificial Sequence
  SAMD9L targeting guide sequence portion
ugugaaaacuuuuauuccuuca

SEQ ID NO: 2428 - RNA, 22 nt, Artificial Sequence
  SAMD9L targeting guide sequence portion
uguuucaucaaaauugcuuuuc

SEQ ID NO: 2429 - RNA, 22 nt, Artificial Sequence
  SAMD9L targeting guide sequence portion
uuauuccuucaugaccaugaaa

SEQ ID NO: 2430 - RNA, 22 nt, Artificial Sequence
  SAMD9L targeting guide sequence portion
uucaucaaaauugcuuuucaug

SEQ ID NO: 2431 - RNA, 22 nt, Artificial Sequence
  SAMD9L targeting guide sequence portion
uucaugaccaugaaaagcaauu

SEQ ID NO: 2432 - RNA, 22 nt, Artificial Sequence
  SAMD9L targeting guide sequence portion
uucauggucaugaaggaauaaa

SEQ ID NO: 2433 - RNA, 22 nt, Artificial Sequence
  SAMD9L targeting guide sequence portion
uuccuucaugaccaugaaaagc

SEQ ID NO: 2434 - RNA, 22 nt, Artificial Sequence
  SAMD9L targeting guide sequence portion
uugcuuuucauggucaugaagg

SEQ ID NO: 2435 - RNA, 22 nt, Artificial Sequence
  SAMD9L targeting guide sequence portion
uuuauuccuucaugaccaugaa

SEQ ID NO: 2436 - RNA, 22 nt, Artificial Sequence
  SAMD9L targeting guide sequence portion
uuucaucaaaauugcuuuucau

SEQ ID NO: 2437 - RNA, 22 nt, Artificial Sequence
  SAMD9L targeting guide sequence portion
uuucauggucaugaaggaauaa

SEQ ID NO: 2438 - RNA, 22 nt, Artificial Sequence
  SAMD9L targeting guide sequence portion
uuuuauuccuucaugaccauga

SEQ ID NO: 2439 - RNA, 22 nt, Artificial Sequence
  SAMD9L targeting guide sequence portion
uuuucauggucaugaaggaaua

SEQ ID NO: 2440 - RNA, 20 nt, Artificial Sequence
  SAMD9L targeting guide sequence portion
aaaagaacugugaaaacuuu

SEQ ID NO: 2441 - RNA, 20 nt, Artificial Sequence
  SAMD9L targeting guide sequence portion
aaaagcagcaaaagaacugu

SEQ ID NO: 2442 - RNA, 20 nt, Artificial Sequence
  SAMD9L targeting guide sequence portion
aaaaguuuucacaguucuuu

SEQ ID NO: 2443 - RNA, 20 nt, Artificial Sequence
  SAMD9L targeting guide sequence portion
aaagaacugugaaaacuuuu

SEQ ID NO: 2444 - RNA, 20 nt, Artificial Sequence
  SAMD9L targeting guide sequence portion
aaagcagcaaaagaacugug

SEQ ID NO: 2445 - RNA, 20 nt, Artificial Sequence
  SAMD9L targeting guide sequence portion
aaaguuuucacaguucuuuu

SEQ ID NO: 2446 - RNA, 20 nt, Artificial Sequence
  SAMD9L targeting guide sequence portion
aaauugaaaagcagcaaaag

SEQ ID NO: 2447 - RNA, 20 nt, Artificial Sequence
  SAMD9L targeting guide sequence portion
aacugaaggaaauugaaaag

SEQ ID NO: 2448 - RNA, 20 nt, Artificial Sequence
  SAMD9L targeting guide sequence portion
aagcagcaaaagaacuguga

SEQ ID NO: 2449 - RNA, 20 nt, Artificial Sequence
  SAMD9L targeting guide sequence portion
aaggaaauugaaaagcagca

SEQ ID NO: 2450 - RNA, 20 nt, Artificial Sequence
  SAMD9L targeting guide sequence portion
aaguuuucacaguucuuuug

SEQ ID NO: 2451 - RNA, 20 nt, Artificial Sequence
  SAMD9L targeting guide sequence portion
aauaaaaguuuucacaguuc

SEQ ID NO: 2452 - RNA, 20 nt, Artificial Sequence
  SAMD9L targeting guide sequence portion
aauugaaaagcagcaaaaga

SEQ ID NO: 2453 - RNA, 20 nt, Artificial Sequence
  SAMD9L targeting guide sequence portion
acaguucuuuugcugcuuuu

SEQ ID NO: 2454 - RNA, 20 nt, Artificial Sequence
  SAMD9L targeting guide sequence portion
acugaaggaaauugaaaagc

SEQ ID NO: 2455 - RNA, 20 nt, Artificial Sequence
  SAMD9L targeting guide sequence portion
agcaaaagaacugugaaaac

SEQ ID NO: 2456 - RNA, 20 nt, Artificial Sequence
  SAMD9L targeting guide sequence portion
agcagcaaaagaacugugaa

SEQ ID NO: 2457 - RNA, 20 nt, Artificial Sequence
  SAMD9L targeting guide sequence portion
aggaaauugaaaagcagcaa

SEQ ID NO: 2458 - RNA, 20 nt, Artificial Sequence
  SAMD9L targeting guide sequence portion
aggaauaaaaguuuucacag

SEQ ID NO: 2459 - RNA, 20 nt, Artificial Sequence
  SAMD9L targeting guide sequence portion
aguucuuuugcugcuuuuca

SEQ ID NO: 2460 - RNA, 20 nt, Artificial Sequence
  SAMD9L targeting guide sequence portion
aguuuucacaguucuuuugc

SEQ ID NO: 2461 - RNA, 20 nt, Artificial Sequence
  SAMD9L targeting guide sequence portion
auaaaaguuuucacaguucu

SEQ ID NO: 2462 - RNA, 20 nt, Artificial Sequence
  SAMD9L targeting guide sequence portion
auugaaaagcagcaaaagaa

SEQ ID NO: 2463 - RNA, 20 nt, Artificial Sequence
  SAMD9L targeting guide sequence portion
caaaagaacugugaaaacuu

SEQ ID NO: 2464 - RNA, 20 nt, Artificial Sequence
  SAMD9L targeting guide sequence portion
cacaguucuuuugcugcuuu

SEQ ID NO: 2465 - RNA, 20 nt, Artificial Sequence
  SAMD9L targeting guide sequence portion
cagcaaaagaacugugaaaa

SEQ ID NO: 2466 - RNA, 20 nt, Artificial Sequence
  SAMD9L targeting guide sequence portion
caguucuuuugcugcuuuuc

SEQ ID NO: 2467 - RNA, 20 nt, Artificial Sequence
  SAMD9L targeting guide sequence portion
cugaaggaaauugaaaagca

SEQ ID NO: 2468 - RNA, 20 nt, Artificial Sequence
  SAMD9L targeting guide sequence portion
cuuuugcugcuuuucaauuu

SEQ ID NO: 2469 - RNA, 20 nt, Artificial Sequence
  SAMD9L targeting guide sequence portion
gaaaagcagcaaaagaacug

SEQ ID NO: 2470 - RNA, 20 nt, Artificial Sequence
  SAMD9L targeting guide sequence portion
gaaauugaaaagcagcaaaa

SEQ ID NO: 2471 - RNA, 20 nt, Artificial Sequence
  SAMD9L targeting guide sequence portion
gaaggaaauugaaaagcagc

SEQ ID NO: 2472 - RNA, 20 nt, Artificial Sequence
  SAMD9L targeting guide sequence portion
gaauaaaaguuuucacaguu

SEQ ID NO: 2473 - RNA, 20 nt, Artificial Sequence
  SAMD9L targeting guide sequence portion
gcaaaagaacugugaaaacu

SEQ ID NO: 2474 - RNA, 20 nt, Artificial Sequence
  SAMD9L targeting guide sequence portion
gcagcaaaagaacugugaaa

SEQ ID NO: 2475 - RNA, 20 nt, Artificial Sequence
  SAMD9L targeting guide sequence portion
ggaaauugaaaagcagcaaa

SEQ ID NO: 2476 - RNA, 20 nt, Artificial Sequence
  SAMD9L targeting guide sequence portion
ggaauaaaaguuuucacagu

SEQ ID NO: 2477 - RNA, 20 nt, Artificial Sequence
  SAMD9L targeting guide sequence portion
guucuuuugcugcuuuucaa

SEQ ID NO: 2478 - RNA, 20 nt, Artificial Sequence
  SAMD9L targeting guide sequence portion
guuuucacaguucuuuugcu

SEQ ID NO: 2479 - RNA, 20 nt, Artificial Sequence
  SAMD9L targeting guide sequence portion
uaaaaguuuucacaguucuu

SEQ ID NO: 2480 - RNA, 20 nt, Artificial Sequence
  SAMD9L targeting guide sequence portion
ucacaguucuuuugcugcuu

SEQ ID NO: 2481 - RNA, 20 nt, Artificial Sequence
  SAMD9L targeting guide sequence portion
ucuuuugcugcuuuucaauu

SEQ ID NO: 2482 - RNA, 20 nt, Artificial Sequence
  SAMD9L targeting guide sequence portion
ugaaaagcagcaaaagaacu

SEQ ID NO: 2483 - RNA, 20 nt, Artificial Sequence
  SAMD9L targeting guide sequence portion
ugaaggaaauugaaaagcag

SEQ ID NO: 2484 - RNA, 20 nt, Artificial Sequence
  SAMD9L targeting guide sequence portion
uucacaguucuuuugcugcu

SEQ ID NO: 2485 - RNA, 20 nt, Artificial Sequence
  SAMD9L targeting guide sequence portion
uucuuuugcugcuuuucaau

SEQ ID NO: 2486 - RNA, 20 nt, Artificial Sequence
  SAMD9L targeting guide sequence portion
uugaaaagcagcaaaagaac

SEQ ID NO: 2487 - RNA, 20 nt, Artificial Sequence
  SAMD9L targeting guide sequence portion
uugcugcuuuucaauuuccu

SEQ ID NO: 2488 - RNA, 20 nt, Artificial Sequence
  SAMD9L targeting guide sequence portion
uuucacaguucuuuugcugc

SEQ ID NO: 2489 - RNA, 20 nt, Artificial Sequence
  SAMD9L targeting guide sequence portion
uuugcugcuuuucaauuucc

SEQ ID NO: 2490 - RNA, 20 nt, Artificial Sequence
  SAMD9L targeting guide sequence portion
uuuucacaguucuuuugcug

SEQ ID NO: 2491 - RNA, 20 nt, Artificial Sequence
  SAMD9L targeting guide sequence portion
uuuugcugcuuuucaauuuc

SEQ ID NO: 2492 - RNA, 21 nt, Artificial Sequence
  SAMD9L targeting guide sequence portion
aaaagaacugugaaaacuuuu

SEQ ID NO: 2493 - RNA, 21 nt, Artificial Sequence
  SAMD9L targeting guide sequence portion
aaaagcagcaaaagaacugug

SEQ ID NO: 2494 - RNA, 21 nt, Artificial Sequence
  SAMD9L targeting guide sequence portion
aaaaguuuucacaguucuuuu

SEQ ID NO: 2495 - RNA, 21 nt, Artificial Sequence
  SAMD9L targeting guide sequence portion
aaacugaaggaaauugaaaag

SEQ ID NO: 2496 - RNA, 21 nt, Artificial Sequence
  SAMD9L targeting guide sequence portion
aaagaacugugaaaacuuuua

SEQ ID NO: 2497 - RNA, 21 nt, Artificial Sequence
  SAMD9L targeting guide sequence portion
aaagcagcaaaagaacuguga

SEQ ID NO: 2498 - RNA, 21 nt, Artificial Sequence
  SAMD9L targeting guide sequence portion
aaaguuuucacaguucuuuug

SEQ ID NO: 2499 - RNA, 21 nt, Artificial Sequence
  SAMD9L targeting guide sequence portion
aaauugaaaagcagcaaaaga

SEQ ID NO: 2500 - RNA, 21 nt, Artificial Sequence
  SAMD9L targeting guide sequence portion
aacugaaggaaauugaaaagc

SEQ ID NO: 2501 - RNA, 21 nt, Artificial Sequence
  SAMD9L targeting guide sequence portion
aagcagcaaaagaacugugaa

SEQ ID NO: 2502 - RNA, 21 nt, Artificial Sequence
  SAMD9L targeting guide sequence portion
aaggaaauugaaaagcagcaa

SEQ ID NO: 2503 - RNA, 21 nt, Artificial Sequence
  SAMD9L targeting guide sequence portion
aaggaauaaaaguuuucacag

SEQ ID NO: 2504 - RNA, 21 nt, Artificial Sequence
  SAMD9L targeting guide sequence portion
aaguuuucacaguucuuuugc

SEQ ID NO: 2505 - RNA, 21 nt, Artificial Sequence
  SAMD9L targeting guide sequence portion
aauaaaaguuuucacaguucu

SEQ ID NO: 2506 - RNA, 21 nt, Artificial Sequence
  SAMD9L targeting guide sequence portion
aauugaaaagcagcaaaagaa

SEQ ID NO: 2507 - RNA, 21 nt, Artificial Sequence
  SAMD9L targeting guide sequence portion
acaguucuuuugcugcuuuuc

SEQ ID NO: 2508 - RNA, 21 nt, Artificial Sequence
  SAMD9L targeting guide sequence portion
acugaaggaaauugaaaagca

SEQ ID NO: 2509 - RNA, 21 nt, Artificial Sequence
  SAMD9L targeting guide sequence portion
agcaaaagaacugugaaaacu

SEQ ID NO: 2510 - RNA, 21 nt, Artificial Sequence
  SAMD9L targeting guide sequence portion
agcagcaaaagaacugugaaa

SEQ ID NO: 2511 - RNA, 21 nt, Artificial Sequence
  SAMD9L targeting guide sequence portion
aggaaauugaaaagcagcaaa

SEQ ID NO: 2512 - RNA, 21 nt, Artificial Sequence
  SAMD9L targeting guide sequence portion
aggaauaaaaguuuucacagu

SEQ ID NO: 2513 - RNA, 21 nt, Artificial Sequence
  SAMD9L targeting guide sequence portion
aguucuuuugcugcuuuucaa

SEQ ID NO: 2514 - RNA, 21 nt, Artificial Sequence
  SAMD9L targeting guide sequence portion
aguuuucacaguucuuuugcu

SEQ ID NO: 2515 - RNA, 21 nt, Artificial Sequence
  SAMD9L targeting guide sequence portion
auaaaaguuuucacaguucuu

SEQ ID NO: 2516 - RNA, 21 nt, Artificial Sequence
  SAMD9L targeting guide sequence portion
auugaaaagcagcaaaagaac

SEQ ID NO: 2517 - RNA, 21 nt, Artificial Sequence
  SAMD9L targeting guide sequence portion
caaaagaacugugaaaacuuu

SEQ ID NO: 2518 - RNA, 21 nt, Artificial Sequence
  SAMD9L targeting guide sequence portion
cacaguucuuuugcugcuuuu

SEQ ID NO: 2519 - RNA, 21 nt, Artificial Sequence
  SAMD9L targeting guide sequence portion
cagcaaaagaacugugaaaac

SEQ ID NO: 2520 - RNA, 21 nt, Artificial Sequence
  SAMD9L targeting guide sequence portion
caguucuuuugcugcuuuuca

SEQ ID NO: 2521 - RNA, 21 nt, Artificial Sequence
  SAMD9L targeting guide sequence portion
cugaaggaaauugaaaagcag

SEQ ID NO: 2522 - RNA, 21 nt, Artificial Sequence
  SAMD9L targeting guide sequence portion
cuuuugcugcuuuucaauuuc

SEQ ID NO: 2523 - RNA, 21 nt, Artificial Sequence
  SAMD9L targeting guide sequence portion
gaaaagcagcaaaagaacugu

SEQ ID NO: 2524 - RNA, 21 nt, Artificial Sequence
  SAMD9L targeting guide sequence portion
gaaauugaaaagcagcaaaag

SEQ ID NO: 2525 - RNA, 21 nt, Artificial Sequence
  SAMD9L targeting guide sequence portion
gaaggaaauugaaaagcagca

SEQ ID NO: 2526 - RNA, 21 nt, Artificial Sequence
  SAMD9L targeting guide sequence portion
gaauaaaaguuuucacaguuc

SEQ ID NO: 2527 - RNA, 21 nt, Artificial Sequence
  SAMD9L targeting guide sequence portion
gcaaaagaacugugaaaacuu

SEQ ID NO: 2528 - RNA, 21 nt, Artificial Sequence
  SAMD9L targeting guide sequence portion
gcagcaaaagaacugugaaaa

SEQ ID NO: 2529 - RNA, 21 nt, Artificial Sequence
  SAMD9L targeting guide sequence portion
ggaaauugaaaagcagcaaaa

SEQ ID NO: 2530 - RNA, 21 nt, Artificial Sequence
  SAMD9L targeting guide sequence portion
ggaauaaaaguuuucacaguu

SEQ ID NO: 2531 - RNA, 21 nt, Artificial Sequence
  SAMD9L targeting guide sequence portion
guucuuuugcugcuuuucaau

SEQ ID NO: 2532 - RNA, 21 nt, Artificial Sequence
  SAMD9L targeting guide sequence portion
guuuucacaguucuuuugcug

SEQ ID NO: 2533 - RNA, 21 nt, Artificial Sequence
  SAMD9L targeting guide sequence portion
uaaaaguuuucacaguucuuu

SEQ ID NO: 2534 - RNA, 21 nt, Artificial Sequence
  SAMD9L targeting guide sequence portion
ucacaguucuuuugcugcuuu

SEQ ID NO: 2535 - RNA, 21 nt, Artificial Sequence
  SAMD9L targeting guide sequence portion
ucuuuugcugcuuuucaauuu

SEQ ID NO: 2536 - RNA, 21 nt, Artificial Sequence
  SAMD9L targeting guide sequence portion
ugaaaagcagcaaaagaacug

SEQ ID NO: 2537 - RNA, 21 nt, Artificial Sequence
  SAMD9L targeting guide sequence portion
ugaaggaaauugaaaagcagc

SEQ ID NO: 2538 - RNA, 21 nt, Artificial Sequence
  SAMD9L targeting guide sequence portion
uucacaguucuuuugcugcuu

SEQ ID NO: 2539 - RNA, 21 nt, Artificial Sequence
  SAMD9L targeting guide sequence portion
uucuuuugcugcuuuucaauu

SEQ ID NO: 2540 - RNA, 21 nt, Artificial Sequence
  SAMD9L targeting guide sequence portion
uugaaaagcagcaaaagaacu

SEQ ID NO: 2541 - RNA, 21 nt, Artificial Sequence
  SAMD9L targeting guide sequence portion
uugcugcuuuucaauuuccuu

SEQ ID NO: 2542 - RNA, 21 nt, Artificial Sequence
  SAMD9L targeting guide sequence portion
uuucacaguucuuuugcugcu

SEQ ID NO: 2543 - RNA, 21 nt, Artificial Sequence
  SAMD9L targeting guide sequence portion
uuugcugcuuuucaauuuccu

SEQ ID NO: 2544 - RNA, 21 nt, Artificial Sequence
  SAMD9L targeting guide sequence portion
uuuucacaguucuuuugcugc

SEQ ID NO: 2545 - RNA, 21 nt, Artificial Sequence
  SAMD9L targeting guide sequence portion
uuuugcugcuuuucaauuucc

SEQ ID NO: 2546 - RNA, 22 nt, Artificial Sequence
  SAMD9L targeting guide sequence portion
aaaagaacugugaaaacuuuua

SEQ ID NO: 2547 - RNA, 22 nt, Artificial Sequence
  SAMD9L targeting guide sequence portion
aaaagcagcaaaagaacuguga

SEQ ID NO: 2548 - RNA, 22 nt, Artificial Sequence
  SAMD9L targeting guide sequence portion
aaaaguuuucacaguucuuuug

SEQ ID NO: 2549 - RNA, 22 nt, Artificial Sequence
  SAMD9L targeting guide sequence portion
aaacugaaggaaauugaaaagc

SEQ ID NO: 2550 - RNA, 22 nt, Artificial Sequence
  SAMD9L targeting guide sequence portion
aaagaacugugaaaacuuuuau

SEQ ID NO: 2551 - RNA, 22 nt, Artificial Sequence
  SAMD9L targeting guide sequence portion
aaagcagcaaaagaacugugaa

SEQ ID NO: 2552 - RNA, 22 nt, Artificial Sequence
  SAMD9L targeting guide sequence portion
aaaguuuucacaguucuuuugc

SEQ ID NO: 2553 - RNA, 22 nt, Artificial Sequence
  SAMD9L targeting guide sequence portion
aaauugaaaagcagcaaaagaa

SEQ ID NO: 2554 - RNA, 22 nt, Artificial Sequence
  SAMD9L targeting guide sequence portion
aacugaaggaaauugaaaagca

SEQ ID NO: 2555 - RNA, 22 nt, Artificial Sequence
  SAMD9L targeting guide sequence portion
aagcagcaaaagaacugugaaa

SEQ ID NO: 2556 - RNA, 22 nt, Artificial Sequence
  SAMD9L targeting guide sequence portion
aaggaaauugaaaagcagcaaa

SEQ ID NO: 2557 - RNA, 22 nt, Artificial Sequence
  SAMD9L targeting guide sequence portion
aaggaauaaaaguuuucacagu

SEQ ID NO: 2558 - RNA, 22 nt, Artificial Sequence
  SAMD9L targeting guide sequence portion
aaguuuucacaguucuuuugcu

SEQ ID NO: 2559 - RNA, 22 nt, Artificial Sequence
  SAMD9L targeting guide sequence portion
aauaaaaguuuucacaguucuu

SEQ ID NO: 2560 - RNA, 22 nt, Artificial Sequence
  SAMD9L targeting guide sequence portion
aauugaaaagcagcaaaagaac

SEQ ID NO: 2561 - RNA, 22 nt, Artificial Sequence
  SAMD9L targeting guide sequence portion
acaguucuuuugcugcuuuuca

SEQ ID NO: 2562 - RNA, 22 nt, Artificial Sequence
  SAMD9L targeting guide sequence portion
acugaaggaaauugaaaagcag

SEQ ID NO: 2563 - RNA, 22 nt, Artificial Sequence
  SAMD9L targeting guide sequence portion
agcaaaagaacugugaaaacuu

SEQ ID NO: 2564 - RNA, 22 nt, Artificial Sequence
  SAMD9L targeting guide sequence portion
agcagcaaaagaacugugaaaa

SEQ ID NO: 2565 - RNA, 22 nt, Artificial Sequence
  SAMD9L targeting guide sequence portion
aggaaauugaaaagcagcaaaa

SEQ ID NO: 2566 - RNA, 22 nt, Artificial Sequence
  SAMD9L targeting guide sequence portion
aggaauaaaaguuuucacaguu

SEQ ID NO: 2567 - RNA, 22 nt, Artificial Sequence
  SAMD9L targeting guide sequence portion
aguucuuuugcugcuuuucaau

SEQ ID NO: 2568 - RNA, 22 nt, Artificial Sequence
  SAMD9L targeting guide sequence portion
aguuuucacaguucuuuugcug

SEQ ID NO: 2569 - RNA, 22 nt, Artificial Sequence
  SAMD9L targeting guide sequence portion
auaaaaguuuucacaguucuuu

SEQ ID NO: 2570 - RNA, 22 nt, Artificial Sequence
  SAMD9L targeting guide sequence portion
auugaaaagcagcaaaagaacu

SEQ ID NO: 2571 - RNA, 22 nt, Artificial Sequence
  SAMD9L targeting guide sequence portion
caaaagaacugugaaaacuuuu

SEQ ID NO: 2572 - RNA, 22 nt, Artificial Sequence
  SAMD9L targeting guide sequence portion
caaacugaaggaaauugaaaag

SEQ ID NO: 2573 - RNA, 22 nt, Artificial Sequence
  SAMD9L targeting guide sequence portion
cacaguucuuuugcugcuuuuc

SEQ ID NO: 2574 - RNA, 22 nt, Artificial Sequence
  SAMD9L targeting guide sequence portion
cagcaaaagaacugugaaaacu

SEQ ID NO: 2575 - RNA, 22 nt, Artificial Sequence
  SAMD9L targeting guide sequence portion
caguucuuuugcugcuuuucaa

SEQ ID NO: 2576 - RNA, 22 nt, Artificial Sequence
  SAMD9L targeting guide sequence portion
cugaaggaaauugaaaagcagc

SEQ ID NO: 2577 - RNA, 22 nt, Artificial Sequence
  SAMD9L targeting guide sequence portion
cuuuugcugcuuuucaauuucc

SEQ ID NO: 2578 - RNA, 22 nt, Artificial Sequence
  SAMD9L targeting guide sequence portion
gaaaagcagcaaaagaacugug

SEQ ID NO: 2579 - RNA, 22 nt, Artificial Sequence
  SAMD9L targeting guide sequence portion
gaaauugaaaagcagcaaaaga

SEQ ID NO: 2580 - RNA, 22 nt, Artificial Sequence
  SAMD9L targeting guide sequence portion
gaaggaaauugaaaagcagcaa

SEQ ID NO: 2581 - RNA, 22 nt, Artificial Sequence
  SAMD9L targeting guide sequence portion
gaaggaauaaaaguuuucacag

SEQ ID NO: 2582 - RNA, 22 nt, Artificial Sequence
  SAMD9L targeting guide sequence portion
gaauaaaaguuuucacaguucu

SEQ ID NO: 2583 - RNA, 22 nt, Artificial Sequence
  SAMD9L targeting guide sequence portion
gcaaaagaacugugaaaacuuu

SEQ ID NO: 2584 - RNA, 22 nt, Artificial Sequence
  SAMD9L targeting guide sequence portion
gcagcaaaagaacugugaaaac

SEQ ID NO: 2585 - RNA, 22 nt, Artificial Sequence
  SAMD9L targeting guide sequence portion
ggaaauugaaaagcagcaaaag

SEQ ID NO: 2586 - RNA, 22 nt, Artificial Sequence
  SAMD9L targeting guide sequence portion
ggaauaaaaguuuucacaguuc

SEQ ID NO: 2587 - RNA, 22 nt, Artificial Sequence
  SAMD9L targeting guide sequence portion
guucuuuugcugcuuuucaauu

SEQ ID NO: 2588 - RNA, 22 nt, Artificial Sequence
  SAMD9L targeting guide sequence portion
guuuucacaguucuuuugcugc

SEQ ID NO: 2589 - RNA, 22 nt, Artificial Sequence
  SAMD9L targeting guide sequence portion
uaaaaguuuucacaguucuuuu

SEQ ID NO: 2590 - RNA, 22 nt, Artificial Sequence
  SAMD9L targeting guide sequence portion
ucacaguucuuuugcugcuuuu

SEQ ID NO: 2591 - RNA, 22 nt, Artificial Sequence
  SAMD9L targeting guide sequence portion
ucuuuugcugcuuuucaauuuc

SEQ ID NO: 2592 - RNA, 22 nt, Artificial Sequence
  SAMD9L targeting guide sequence portion
ugaaaagcagcaaaagaacugu

SEQ ID NO: 2593 - RNA, 22 nt, Artificial Sequence
  SAMD9L targeting guide sequence portion
ugaaggaaauugaaaagcagca

SEQ ID NO: 2594 - RNA, 22 nt, Artificial Sequence
  SAMD9L targeting guide sequence portion
uucacaguucuuuugcugcuuu

SEQ ID NO: 2595 - RNA, 22 nt, Artificial Sequence
  SAMD9L targeting guide sequence portion
uucuuuugcugcuuuucaauuu

SEQ ID NO: 2596 - RNA, 22 nt, Artificial Sequence
  SAMD9L targeting guide sequence portion
uugaaaagcagcaaaagaacug

SEQ ID NO: 2597 - RNA, 22 nt, Artificial Sequence
  SAMD9L targeting guide sequence portion
uugcugcuuuucaauuuccuuc

SEQ ID NO: 2598 - RNA, 22 nt, Artificial Sequence
  SAMD9L targeting guide sequence portion
uuucacaguucuuuugcugcuu

SEQ ID NO: 2599 - RNA, 22 nt, Artificial Sequence
  SAMD9L targeting guide sequence portion
uuugcugcuuuucaauuuccuu

SEQ ID NO: 2600 - RNA, 22 nt, Artificial Sequence
  SAMD9L targeting guide sequence portion
uuuucacaguucuuuugcugcu

SEQ ID NO: 2601 - RNA, 22 nt, Artificial Sequence
  SAMD9L targeting guide sequence portion
uuuugcugcuuuucaauuuccu

SEQ ID NO: 2602 - RNA, 20 nt, Artificial Sequence
  SAMD9L targeting guide sequence portion
aaacugcaagagaucccgga

SEQ ID NO: 2603 - RNA, 20 nt, Artificial Sequence
  SAMD9L targeting guide sequence portion
aacugcaagagaucccggaa

SEQ ID NO: 2604 - RNA, 20 nt, Artificial Sequence
  SAMD9L targeting guide sequence portion
aagagaucccggaauccaga

SEQ ID NO: 2605 - RNA, 20 nt, Artificial Sequence
  SAMD9L targeting guide sequence portion
aauuaucuuaaacugcaaga

SEQ ID NO: 2606 - RNA, 20 nt, Artificial Sequence
  SAMD9L targeting guide sequence portion
acauugguaauuaucuuaaa

SEQ ID NO: 2607 - RNA, 20 nt, Artificial Sequence
  SAMD9L targeting guide sequence portion
acugcaagagaucccggaau

SEQ ID NO: 2608 - RNA, 20 nt, Artificial Sequence
  SAMD9L targeting guide sequence portion
acuuucaucuggauuccggg

SEQ ID NO: 2609 - RNA, 20 nt, Artificial Sequence
  SAMD9L targeting guide sequence portion
agagaucccggaauccagau

SEQ ID NO: 2610 - RNA, 20 nt, Artificial Sequence
  SAMD9L targeting guide sequence portion
aucucuugcaguuuaagaua

SEQ ID NO: 2611 - RNA, 20 nt, Artificial Sequence
  SAMD9L targeting guide sequence portion
aucuggauuccgggaucucu

SEQ ID NO: 2612 - RNA, 20 nt, Artificial Sequence
  SAMD9L targeting guide sequence portion
aucuuaaacugcaagagauc

SEQ ID NO: 2613 - RNA, 20 nt, Artificial Sequence
  SAMD9L targeting guide sequence portion
auuaucuuaaacugcaagag

SEQ ID NO: 2614 - RNA, 20 nt, Artificial Sequence
  SAMD9L targeting guide sequence portion
auuccgggaucucuugcagu

SEQ ID NO: 2615 - RNA, 20 nt, Artificial Sequence
  SAMD9L targeting guide sequence portion
auugguaauuaucuuaaacu

SEQ ID NO: 2616 - RNA, 20 nt, Artificial Sequence
  SAMD9L targeting guide sequence portion
caagagaucccggaauccag

SEQ ID NO: 2617 - RNA, 20 nt, Artificial Sequence
  SAMD9L targeting guide sequence portion
caucuggauuccgggaucuc

SEQ ID NO: 2618 - RNA, 20 nt, Artificial Sequence
  SAMD9L targeting guide sequence portion
cauugguaauuaucuuaaac

SEQ ID NO: 2619 - RNA, 20 nt, Artificial Sequence
  SAMD9L targeting guide sequence portion
ccgggaucucuugcaguuua

SEQ ID NO: 2620 - RNA, 20 nt, Artificial Sequence
  SAMD9L targeting guide sequence portion
cgggaucucuugcaguuuaa

SEQ ID NO: 2621 - RNA, 20 nt, Artificial Sequence
  SAMD9L targeting guide sequence portion
cucuugcaguuuaagauaau

SEQ ID NO: 2622 - RNA, 20 nt, Artificial Sequence
  SAMD9L targeting guide sequence portion
cugcaagagaucccggaauc

SEQ ID NO: 2623 - RNA, 20 nt, Artificial Sequence
  SAMD9L targeting guide sequence portion
cuggauuccgggaucucuug

SEQ ID NO: 2624 - RNA, 20 nt, Artificial Sequence
  SAMD9L targeting guide sequence portion
cuuaaacugcaagagauccc

SEQ ID NO: 2625 - RNA, 20 nt, Artificial Sequence
  SAMD9L targeting guide sequence portion
cuugcaguuuaagauaauua

SEQ ID NO: 2626 - RNA, 20 nt, Artificial Sequence
  SAMD9L targeting guide sequence portion
cuuucaucuggauuccggga

SEQ ID NO: 2627 - RNA, 20 nt, Artificial Sequence
  SAMD9L targeting guide sequence portion
gaucucuugcaguuuaagau

SEQ ID NO: 2628 - RNA, 20 nt, Artificial Sequence
  SAMD9L targeting guide sequence portion
gauuccgggaucucuugcag

SEQ ID NO: 2629 - RNA, 20 nt, Artificial Sequence
  SAMD9L targeting guide sequence portion
gcaagagaucccggaaucca

SEQ ID NO: 2630 - RNA, 20 nt, Artificial Sequence
  SAMD9L targeting guide sequence portion
ggaucucuugcaguuuaaga

SEQ ID NO: 2631 - RNA, 20 nt, Artificial Sequence
  SAMD9L targeting guide sequence portion
ggauuccgggaucucuugca

SEQ ID NO: 2632 - RNA, 20 nt, Artificial Sequence
  SAMD9L targeting guide sequence portion
gggaucucuugcaguuuaag

SEQ ID NO: 2633 - RNA, 20 nt, Artificial Sequence
  SAMD9L targeting guide sequence portion
gguaauuaucuuaaacugca

SEQ ID NO: 2634 - RNA, 20 nt, Artificial Sequence
  SAMD9L targeting guide sequence portion
guaauuaucuuaaacugcaa

SEQ ID NO: 2635 - RNA, 20 nt, Artificial Sequence
  SAMD9L targeting guide sequence portion
uaaacugcaagagaucccgg

SEQ ID NO: 2636 - RNA, 20 nt, Artificial Sequence
  SAMD9L targeting guide sequence portion
uaauuaucuuaaacugcaag

SEQ ID NO: 2637 - RNA, 20 nt, Artificial Sequence
  SAMD9L targeting guide sequence portion
uaucuuaaacugcaagagau

SEQ ID NO: 2638 - RNA, 20 nt, Artificial Sequence
  SAMD9L targeting guide sequence portion
ucaucuggauuccgggaucu

SEQ ID NO: 2639 - RNA, 20 nt, Artificial Sequence
  SAMD9L targeting guide sequence portion
uccgggaucucuugcaguuu

SEQ ID NO: 2640 - RNA, 20 nt, Artificial Sequence
  SAMD9L targeting guide sequence portion
ucucuugcaguuuaagauaa

SEQ ID NO: 2641 - RNA, 20 nt, Artificial Sequence
  SAMD9L targeting guide sequence portion
ucuggauuccgggaucucuu

SEQ ID NO: 2642 - RNA, 20 nt, Artificial Sequence
  SAMD9L targeting guide sequence portion
ucuuaaacugcaagagaucc

SEQ ID NO: 2643 - RNA, 20 nt, Artificial Sequence
  SAMD9L targeting guide sequence portion
ucuugcaguuuaagauaauu

SEQ ID NO: 2644 - RNA, 20 nt, Artificial Sequence
  SAMD9L targeting guide sequence portion
ugcaagagaucccggaaucc

SEQ ID NO: 2645 - RNA, 20 nt, Artificial Sequence
  SAMD9L targeting guide sequence portion
uggauuccgggaucucuugc

SEQ ID NO: 2646 - RNA, 20 nt, Artificial Sequence
  SAMD9L targeting guide sequence portion
ugguaauuaucuuaaacugc

SEQ ID NO: 2647 - RNA, 20 nt, Artificial Sequence
  SAMD9L targeting guide sequence portion
uuaaacugcaagagaucccg

SEQ ID NO: 2648 - RNA, 20 nt, Artificial Sequence
  SAMD9L targeting guide sequence portion
uuaucuuaaacugcaagaga

SEQ ID NO: 2649 - RNA, 20 nt, Artificial Sequence
  SAMD9L targeting guide sequence portion
uucaucuggauuccgggauc

SEQ ID NO: 2650 - RNA, 20 nt, Artificial Sequence
  SAMD9L targeting guide sequence portion
uuccgggaucucuugcaguu

SEQ ID NO: 2651 - RNA, 20 nt, Artificial Sequence
  SAMD9L targeting guide sequence portion
uugcaguuuaagauaauuac

SEQ ID NO: 2652 - RNA, 20 nt, Artificial Sequence
  SAMD9L targeting guide sequence portion
uugguaauuaucuuaaacug

SEQ ID NO: 2653 - RNA, 20 nt, Artificial Sequence
  SAMD9L targeting guide sequence portion
uuucaucuggauuccgggau

SEQ ID NO: 2654 - RNA, 21 nt, Artificial Sequence
  SAMD9L targeting guide sequence portion
aaacugcaagagaucccggaa

SEQ ID NO: 2655 - RNA, 21 nt, Artificial Sequence
  SAMD9L targeting guide sequence portion
aacugcaagagaucccggaau

SEQ ID NO: 2656 - RNA, 21 nt, Artificial Sequence
  SAMD9L targeting guide sequence portion
aagagaucccggaauccagau

SEQ ID NO: 2657 - RNA, 21 nt, Artificial Sequence
  SAMD9L targeting guide sequence portion
aauuaucuuaaacugcaagag

SEQ ID NO: 2658 - RNA, 21 nt, Artificial Sequence
  SAMD9L targeting guide sequence portion
acauugguaauuaucuuaaac

SEQ ID NO: 2659 - RNA, 21 nt, Artificial Sequence
  SAMD9L targeting guide sequence portion
acugcaagagaucccggaauc

SEQ ID NO: 2660 - RNA, 21 nt, Artificial Sequence
  SAMD9L targeting guide sequence portion
acuuucaucuggauuccggga

SEQ ID NO: 2661 - RNA, 21 nt, Artificial Sequence
  SAMD9L targeting guide sequence portion
agagaucccggaauccagaug

SEQ ID NO: 2662 - RNA, 21 nt, Artificial Sequence
  SAMD9L targeting guide sequence portion
aucucuugcaguuuaagauaa

SEQ ID NO: 2663 - RNA, 21 nt, Artificial Sequence
  SAMD9L targeting guide sequence portion
aucuggauuccgggaucucuu

SEQ ID NO: 2664 - RNA, 21 nt, Artificial Sequence
  SAMD9L targeting guide sequence portion
aucuuaaacugcaagagaucc

SEQ ID NO: 2665 - RNA, 21 nt, Artificial Sequence
  SAMD9L targeting guide sequence portion
auuaucuuaaacugcaagaga

SEQ ID NO: 2666 - RNA, 21 nt, Artificial Sequence
  SAMD9L targeting guide sequence portion
auuccgggaucucuugcaguu

SEQ ID NO: 2667 - RNA, 21 nt, Artificial Sequence
  SAMD9L targeting guide sequence portion
auugguaauuaucuuaaacug

SEQ ID NO: 2668 - RNA, 21 nt, Artificial Sequence
  SAMD9L targeting guide sequence portion
caagagaucccggaauccaga

SEQ ID NO: 2669 - RNA, 21 nt, Artificial Sequence
  SAMD9L targeting guide sequence portion
cacuuucaucuggauuccggg

SEQ ID NO: 2670 - RNA, 21 nt, Artificial Sequence
  SAMD9L targeting guide sequence portion
caucuggauuccgggaucucu

SEQ ID NO: 2671 - RNA, 21 nt, Artificial Sequence
  SAMD9L targeting guide sequence portion
cauugguaauuaucuuaaacu

SEQ ID NO: 2672 - RNA, 21 nt, Artificial Sequence
  SAMD9L targeting guide sequence portion
ccgggaucucuugcaguuuaa

SEQ ID NO: 2673 - RNA, 21 nt, Artificial Sequence
  SAMD9L targeting guide sequence portion
cgggaucucuugcaguuuaag

SEQ ID NO: 2674 - RNA, 21 nt, Artificial Sequence
  SAMD9L targeting guide sequence portion
cucuugcaguuuaagauaauu

SEQ ID NO: 2675 - RNA, 21 nt, Artificial Sequence
  SAMD9L targeting guide sequence portion
cugcaagagaucccggaaucc

SEQ ID NO: 2676 - RNA, 21 nt, Artificial Sequence
  SAMD9L targeting guide sequence portion
cuggauuccgggaucucuugc

SEQ ID NO: 2677 - RNA, 21 nt, Artificial Sequence
  SAMD9L targeting guide sequence portion
cuuaaacugcaagagaucccg

SEQ ID NO: 2678 - RNA, 21 nt, Artificial Sequence
  SAMD9L targeting guide sequence portion
cuugcaguuuaagauaauuac

SEQ ID NO: 2679 - RNA, 21 nt, Artificial Sequence
  SAMD9L targeting guide sequence portion
cuuucaucuggauuccgggau

SEQ ID NO: 2680 - RNA, 21 nt, Artificial Sequence
  SAMD9L targeting guide sequence portion
gaucucuugcaguuuaagaua

SEQ ID NO: 2681 - RNA, 21 nt, Artificial Sequence
  SAMD9L targeting guide sequence portion
gauuccgggaucucuugcagu

SEQ ID NO: 2682 - RNA, 21 nt, Artificial Sequence
  SAMD9L targeting guide sequence portion
gcaagagaucccggaauccag

SEQ ID NO: 2683 - RNA, 21 nt, Artificial Sequence
  SAMD9L targeting guide sequence portion
ggaucucuugcaguuuaagau

SEQ ID NO: 2684 - RNA, 21 nt, Artificial Sequence
  SAMD9L targeting guide sequence portion
ggauuccgggaucucuugcag

SEQ ID NO: 2685 - RNA, 21 nt, Artificial Sequence
  SAMD9L targeting guide sequence portion
gggaucucuugcaguuuaaga

SEQ ID NO: 2686 - RNA, 21 nt, Artificial Sequence
  SAMD9L targeting guide sequence portion
gguaauuaucuuaaacugcaa

SEQ ID NO: 2687 - RNA, 21 nt, Artificial Sequence
  SAMD9L targeting guide sequence portion
guaauuaucuuaaacugcaag

SEQ ID NO: 2688 - RNA, 21 nt, Artificial Sequence
  SAMD9L targeting guide sequence portion
uaaacugcaagagaucccgga

SEQ ID NO: 2689 - RNA, 21 nt, Artificial Sequence
  SAMD9L targeting guide sequence portion
uaauuaucuuaaacugcaaga

SEQ ID NO: 2690 - RNA, 21 nt, Artificial Sequence
  SAMD9L targeting guide sequence portion
uaucuuaaacugcaagagauc

SEQ ID NO: 2691 - RNA, 21 nt, Artificial Sequence
  SAMD9L targeting guide sequence portion
ucaucuggauuccgggaucuc

SEQ ID NO: 2692 - RNA, 21 nt, Artificial Sequence
  SAMD9L targeting guide sequence portion
uccgggaucucuugcaguuua

SEQ ID NO: 2693 - RNA, 21 nt, Artificial Sequence
  SAMD9L targeting guide sequence portion
ucucuugcaguuuaagauaau

SEQ ID NO: 2694 - RNA, 21 nt, Artificial Sequence
  SAMD9L targeting guide sequence portion
ucuggauuccgggaucucuug

SEQ ID NO: 2695 - RNA, 21 nt, Artificial Sequence
  SAMD9L targeting guide sequence portion
ucuuaaacugcaagagauccc

SEQ ID NO: 2696 - RNA, 21 nt, Artificial Sequence
  SAMD9L targeting guide sequence portion
ucuugcaguuuaagauaauua

SEQ ID NO: 2697 - RNA, 21 nt, Artificial Sequence
  SAMD9L targeting guide sequence portion
ugcaagagaucccggaaucca

SEQ ID NO: 2698 - RNA, 21 nt, Artificial Sequence
  SAMD9L targeting guide sequence portion
uggauuccgggaucucuugca

SEQ ID NO: 2699 - RNA, 21 nt, Artificial Sequence
  SAMD9L targeting guide sequence portion
ugguaauuaucuuaaacugca

SEQ ID NO: 2700 - RNA, 21 nt, Artificial Sequence
  SAMD9L targeting guide sequence portion
uuaaacugcaagagaucccgg

SEQ ID NO: 2701 - RNA, 21 nt, Artificial Sequence
  SAMD9L targeting guide sequence portion
uuaucuuaaacugcaagagau

SEQ ID NO: 2702 - RNA, 21 nt, Artificial Sequence
  SAMD9L targeting guide sequence portion
uucaucuggauuccgggaucu

SEQ ID NO: 2703 - RNA, 21 nt, Artificial Sequence
  SAMD9L targeting guide sequence portion
uuccgggaucucuugcaguuu

SEQ ID NO: 2704 - RNA, 21 nt, Artificial Sequence
  SAMD9L targeting guide sequence portion
uugcaguuuaagauaauuacc

SEQ ID NO: 2705 - RNA, 21 nt, Artificial Sequence
  SAMD9L targeting guide sequence portion
uugguaauuaucuuaaacugc

SEQ ID NO: 2706 - RNA, 21 nt, Artificial Sequence
  SAMD9L targeting guide sequence portion
uuucaucuggauuccgggauc

SEQ ID NO: 2707 - RNA, 22 nt, Artificial Sequence
  SAMD9L targeting guide sequence portion
aaacugcaagagaucccggaau

SEQ ID NO: 2708 - RNA, 22 nt, Artificial Sequence
  SAMD9L targeting guide sequence portion
aacauugguaauuaucuuaaac

SEQ ID NO: 2709 - RNA, 22 nt, Artificial Sequence
  SAMD9L targeting guide sequence portion
aacugcaagagaucccggaauc

SEQ ID NO: 2710 - RNA, 22 nt, Artificial Sequence
  SAMD9L targeting guide sequence portion
aagagaucccggaauccagaug

SEQ ID NO: 2711 - RNA, 22 nt, Artificial Sequence
  SAMD9L targeting guide sequence portion
aauuaucuuaaacugcaagaga

SEQ ID NO: 2712 - RNA, 22 nt, Artificial Sequence
  SAMD9L targeting guide sequence portion
acauugguaauuaucuuaaacu

SEQ ID NO: 2713 - RNA, 22 nt, Artificial Sequence
  SAMD9L targeting guide sequence portion
acugcaagagaucccggaaucc

SEQ ID NO: 2714 - RNA, 22 nt, Artificial Sequence
  SAMD9L targeting guide sequence portion
acuuucaucuggauuccgggau

SEQ ID NO: 2715 - RNA, 22 nt, Artificial Sequence
  SAMD9L targeting guide sequence portion
agagaucccggaauccagauga

SEQ ID NO: 2716 - RNA, 22 nt, Artificial Sequence
  SAMD9L targeting guide sequence portion
aucucuugcaguuuaagauaau

SEQ ID NO: 2717 - RNA, 22 nt, Artificial Sequence
  SAMD9L targeting guide sequence portion
aucuggauuccgggaucucuug

SEQ ID NO: 2718 - RNA, 22 nt, Artificial Sequence
  SAMD9L targeting guide sequence portion
aucuuaaacugcaagagauccc

SEQ ID NO: 2719 - RNA, 22 nt, Artificial Sequence
  SAMD9L targeting guide sequence portion
auuaucuuaaacugcaagagau

SEQ ID NO: 2720 - RNA, 22 nt, Artificial Sequence
  SAMD9L targeting guide sequence portion
auuccgggaucucuugcaguuu

SEQ ID NO: 2721 - RNA, 22 nt, Artificial Sequence
  SAMD9L targeting guide sequence portion
auugguaauuaucuuaaacugc

SEQ ID NO: 2722 - RNA, 22 nt, Artificial Sequence
  SAMD9L targeting guide sequence portion
caagagaucccggaauccagau

SEQ ID NO: 2723 - RNA, 22 nt, Artificial Sequence
  SAMD9L targeting guide sequence portion
cacuuucaucuggauuccggga

SEQ ID NO: 2724 - RNA, 22 nt, Artificial Sequence
  SAMD9L targeting guide sequence portion
caucuggauuccgggaucucuu

SEQ ID NO: 2725 - RNA, 22 nt, Artificial Sequence
  SAMD9L targeting guide sequence portion
cauugguaauuaucuuaaacug

SEQ ID NO: 2726 - RNA, 22 nt, Artificial Sequence
  SAMD9L targeting guide sequence portion
ccgggaucucuugcaguuuaag

SEQ ID NO: 2727 - RNA, 22 nt, Artificial Sequence
  SAMD9L targeting guide sequence portion
cgggaucucuugcaguuuaaga

SEQ ID NO: 2728 - RNA, 22 nt, Artificial Sequence
  SAMD9L targeting guide sequence portion
cucuugcaguuuaagauaauua

SEQ ID NO: 2729 - RNA, 22 nt, Artificial Sequence
  SAMD9L targeting guide sequence portion
cugcaagagaucccggaaucca

SEQ ID NO: 2730 - RNA, 22 nt, Artificial Sequence
  SAMD9L targeting guide sequence portion
cuggauuccgggaucucuugca

SEQ ID NO: 2731 - RNA, 22 nt, Artificial Sequence
  SAMD9L targeting guide sequence portion
cuuaaacugcaagagaucccgg

SEQ ID NO: 2732 - RNA, 22 nt, Artificial Sequence
  SAMD9L targeting guide sequence portion
cuugcaguuuaagauaauuacc

SEQ ID NO: 2733 - RNA, 22 nt, Artificial Sequence
  SAMD9L targeting guide sequence portion
cuuucaucuggauuccgggauc

SEQ ID NO: 2734 - RNA, 22 nt, Artificial Sequence
  SAMD9L targeting guide sequence portion
gaucucuugcaguuuaagauaa

SEQ ID NO: 2735 - RNA, 22 nt, Artificial Sequence
  SAMD9L targeting guide sequence portion
gauuccgggaucucuugcaguu

SEQ ID NO: 2736 - RNA, 22 nt, Artificial Sequence
  SAMD9L targeting guide sequence portion
gcaagagaucccggaauccaga

SEQ ID NO: 2737 - RNA, 22 nt, Artificial Sequence
  SAMD9L targeting guide sequence portion
gcacuuucaucuggauuccggg

SEQ ID NO: 2738 - RNA, 22 nt, Artificial Sequence
  SAMD9L targeting guide sequence portion
ggaucucuugcaguuuaagaua

SEQ ID NO: 2739 - RNA, 22 nt, Artificial Sequence
  SAMD9L targeting guide sequence portion
ggauuccgggaucucuugcagu

SEQ ID NO: 2740 - RNA, 22 nt, Artificial Sequence
  SAMD9L targeting guide sequence portion
gggaucucuugcaguuuaagau

SEQ ID NO: 2741 - RNA, 22 nt, Artificial Sequence
  SAMD9L targeting guide sequence portion
gguaauuaucuuaaacugcaag

SEQ ID NO: 2742 - RNA, 22 nt, Artificial Sequence
  SAMD9L targeting guide sequence portion
guaauuaucuuaaacugcaaga

SEQ ID NO: 2743 - RNA, 22 nt, Artificial Sequence
  SAMD9L targeting guide sequence portion
uaaacugcaagagaucccggaa

SEQ ID NO: 2744 - RNA, 22 nt, Artificial Sequence
  SAMD9L targeting guide sequence portion
uaauuaucuuaaacugcaagag

SEQ ID NO: 2745 - RNA, 22 nt, Artificial Sequence
  SAMD9L targeting guide sequence portion
uaucuuaaacugcaagagaucc

SEQ ID NO: 2746 - RNA, 22 nt, Artificial Sequence
  SAMD9L targeting guide sequence portion
ucaucuggauuccgggaucucu

SEQ ID NO: 2747 - RNA, 22 nt, Artificial Sequence
  SAMD9L targeting guide sequence portion
uccgggaucucuugcaguuuaa

SEQ ID NO: 2748 - RNA, 22 nt, Artificial Sequence
  SAMD9L targeting guide sequence portion
ucucuugcaguuuaagauaauu

SEQ ID NO: 2749 - RNA, 22 nt, Artificial Sequence
  SAMD9L targeting guide sequence portion
ucuggauuccgggaucucuugc

SEQ ID NO: 2750 - RNA, 22 nt, Artificial Sequence
  SAMD9L targeting guide sequence portion
ucuuaaacugcaagagaucccg

SEQ ID NO: 2751 - RNA, 22 nt, Artificial Sequence
  SAMD9L targeting guide sequence portion
ucuugcaguuuaagauaauuac

SEQ ID NO: 2752 - RNA, 22 nt, Artificial Sequence
  SAMD9L targeting guide sequence portion
ugcaagagaucccggaauccag

SEQ ID NO: 2753 - RNA, 22 nt, Artificial Sequence
  SAMD9L targeting guide sequence portion
uggauuccgggaucucuugcag

SEQ ID NO: 2754 - RNA, 22 nt, Artificial Sequence
  SAMD9L targeting guide sequence portion
ugguaauuaucuuaaacugcaa

SEQ ID NO: 2755 - RNA, 22 nt, Artificial Sequence
  SAMD9L targeting guide sequence portion
uuaaacugcaagagaucccgga

SEQ ID NO: 2756 - RNA, 22 nt, Artificial Sequence
  SAMD9L targeting guide sequence portion
uuaucuuaaacugcaagagauc

SEQ ID NO: 2757 - RNA, 22 nt, Artificial Sequence
  SAMD9L targeting guide sequence portion
uucaucuggauuccgggaucuc

SEQ ID NO: 2758 - RNA, 22 nt, Artificial Sequence
  SAMD9L targeting guide sequence portion
uuccgggaucucuugcaguuua

SEQ ID NO: 2759 - RNA, 22 nt, Artificial Sequence
  SAMD9L targeting guide sequence portion
uugcaguuuaagauaauuacca

SEQ ID NO: 2760 - RNA, 22 nt, Artificial Sequence
  SAMD9L targeting guide sequence portion
uugguaauuaucuuaaacugca

SEQ ID NO: 2761 - RNA, 22 nt, Artificial Sequence
  SAMD9L targeting guide sequence portion
uuucaucuggauuccgggaucu

SEQ ID NO: 2762 - RNA, 20 nt, Artificial Sequence
  SAMD9L targeting guide sequence portion
aaauauugguuuaggaggcu

SEQ ID NO: 2763 - RNA, 20 nt, Artificial Sequence
  SAMD9L targeting guide sequence portion
aauacacugcugggcagagc

SEQ ID NO: 2764 - RNA, 20 nt, Artificial Sequence
  SAMD9L targeting guide sequence portion
aauauugguuuaggaggcuc

SEQ ID NO: 2765 - RNA, 20 nt, Artificial Sequence
  SAMD9L targeting guide sequence portion
acacugcugggcagagccuc

SEQ ID NO: 2766 - RNA, 20 nt, Artificial Sequence
  SAMD9L targeting guide sequence portion
acugcugggcagagccuccu

SEQ ID NO: 2767 - RNA, 20 nt, Artificial Sequence
  SAMD9L targeting guide sequence portion
agagccuccuaaaccaauau

SEQ ID NO: 2768 - RNA, 20 nt, Artificial Sequence
  SAMD9L targeting guide sequence portion
agauuuaauacacugcuggg

SEQ ID NO: 2769 - RNA, 20 nt, Artificial Sequence
  SAMD9L targeting guide sequence portion
agccuccuaaaccaauauuu

SEQ ID NO: 2770 - RNA, 20 nt, Artificial Sequence
  SAMD9L targeting guide sequence portion
aggaggcucugcccagcagu

SEQ ID NO: 2771 - RNA, 20 nt, Artificial Sequence
  SAMD9L targeting guide sequence portion
aggcucugcccagcagugua

SEQ ID NO: 2772 - RNA, 20 nt, Artificial Sequence
  SAMD9L targeting guide sequence portion
auacacugcugggcagagcc

SEQ ID NO: 2773 - RNA, 20 nt, Artificial Sequence
  SAMD9L targeting guide sequence portion
auauugguuuaggaggcucu

SEQ ID NO: 2774 - RNA, 20 nt, Artificial Sequence
  SAMD9L targeting guide sequence portion
auugguuuaggaggcucugc

SEQ ID NO: 2775 - RNA, 20 nt, Artificial Sequence
  SAMD9L targeting guide sequence portion
auuuaauacacugcugggca

SEQ ID NO: 2776 - RNA, 20 nt, Artificial Sequence
  SAMD9L targeting guide sequence portion
auuuuugcaaauauugguuu

SEQ ID NO: 2777 - RNA, 20 nt, Artificial Sequence
  SAMD9L targeting guide sequence portion
caaauauugguuuaggaggc

SEQ ID NO: 2778 - RNA, 20 nt, Artificial Sequence
  SAMD9L targeting guide sequence portion
cacugcugggcagagccucc

SEQ ID NO: 2779 - RNA, 20 nt, Artificial Sequence
  SAMD9L targeting guide sequence portion
cagagccuccuaaaccaaua

SEQ ID NO: 2780 - RNA, 20 nt, Artificial Sequence
  SAMD9L targeting guide sequence portion
ccuccuaaaccaauauuugc

SEQ ID NO: 2781 - RNA, 20 nt, Artificial Sequence
  SAMD9L targeting guide sequence portion
cugcugggcagagccuccua

SEQ ID NO: 2782 - RNA, 20 nt, Artificial Sequence
  SAMD9L targeting guide sequence portion
cugggcagagccuccuaaac

SEQ ID NO: 2783 - RNA, 20 nt, Artificial Sequence
  SAMD9L targeting guide sequence portion
gagccuccuaaaccaauauu

SEQ ID NO: 2784 - RNA, 20 nt, Artificial Sequence
  SAMD9L targeting guide sequence portion
gaggcucugcccagcagugu

SEQ ID NO: 2785 - RNA, 20 nt, Artificial Sequence
  SAMD9L targeting guide sequence portion
gauuuaauacacugcugggc

SEQ ID NO: 2786 - RNA, 20 nt, Artificial Sequence
  SAMD9L targeting guide sequence portion
gcaaauauugguuuaggagg

SEQ ID NO: 2787 - RNA, 20 nt, Artificial Sequence
  SAMD9L targeting guide sequence portion
gcagagccuccuaaaccaau

SEQ ID NO: 2788 - RNA, 20 nt, Artificial Sequence
  SAMD9L targeting guide sequence portion
gccuccuaaaccaauauuug

SEQ ID NO: 2789 - RNA, 20 nt, Artificial Sequence
  SAMD9L targeting guide sequence portion
gcucugcccagcaguguauu

SEQ ID NO: 2790 - RNA, 20 nt, Artificial Sequence
  SAMD9L targeting guide sequence portion
gcugggcagagccuccuaaa

SEQ ID NO: 2791 - RNA, 20 nt, Artificial Sequence
  SAMD9L targeting guide sequence portion
ggaggcucugcccagcagug

SEQ ID NO: 2792 - RNA, 20 nt, Artificial Sequence
  SAMD9L targeting guide sequence portion
ggcagagccuccuaaaccaa

SEQ ID NO: 2793 - RNA, 20 nt, Artificial Sequence
  SAMD9L targeting guide sequence portion
ggcucugcccagcaguguau

SEQ ID NO: 2794 - RNA, 20 nt, Artificial Sequence
  SAMD9L targeting guide sequence portion
gggcagagccuccuaaacca

SEQ ID NO: 2795 - RNA, 20 nt, Artificial Sequence
  SAMD9L targeting guide sequence portion
gguuuaggaggcucugccca

SEQ ID NO: 2796 - RNA, 20 nt, Artificial Sequence
  SAMD9L targeting guide sequence portion
guuuaggaggcucugcccag

SEQ ID NO: 2797 - RNA, 20 nt, Artificial Sequence
  SAMD9L targeting guide sequence portion
uaauacacugcugggcagag

SEQ ID NO: 2798 - RNA, 20 nt, Artificial Sequence
  SAMD9L targeting guide sequence portion
uacacugcugggcagagccu

SEQ ID NO: 2799 - RNA, 20 nt, Artificial Sequence
  SAMD9L targeting guide sequence portion
uaggaggcucugcccagcag

SEQ ID NO: 2800 - RNA, 20 nt, Artificial Sequence
  SAMD9L targeting guide sequence portion
uauugguuuaggaggcucug

SEQ ID NO: 2801 - RNA, 20 nt, Artificial Sequence
  SAMD9L targeting guide sequence portion
ugcaaauauugguuuaggag

SEQ ID NO: 2802 - RNA, 20 nt, Artificial Sequence
  SAMD9L targeting guide sequence portion
ugcugggcagagccuccuaa

SEQ ID NO: 2803 - RNA, 20 nt, Artificial Sequence
  SAMD9L targeting guide sequence portion
ugggcagagccuccuaaacc

SEQ ID NO: 2804 - RNA, 20 nt, Artificial Sequence
  SAMD9L targeting guide sequence portion
ugguuuaggaggcucugccc

SEQ ID NO: 2805 - RNA, 20 nt, Artificial Sequence
  SAMD9L targeting guide sequence portion
uuaauacacugcugggcaga

SEQ ID NO: 2806 - RNA, 20 nt, Artificial Sequence
  SAMD9L targeting guide sequence portion
uuaggaggcucugcccagca

SEQ ID NO: 2807 - RNA, 20 nt, Artificial Sequence
  SAMD9L targeting guide sequence portion
uugcaaauauugguuuagga

SEQ ID NO: 2808 - RNA, 20 nt, Artificial Sequence
  SAMD9L targeting guide sequence portion
uugguuuaggaggcucugcc

SEQ ID NO: 2809 - RNA, 20 nt, Artificial Sequence
  SAMD9L targeting guide sequence portion
uuuaauacacugcugggcag

SEQ ID NO: 2810 - RNA, 20 nt, Artificial Sequence
  SAMD9L targeting guide sequence portion
uuuaggaggcucugcccagc

SEQ ID NO: 2811 - RNA, 20 nt, Artificial Sequence
  SAMD9L targeting guide sequence portion
uuugcaaauauugguuuagg

SEQ ID NO: 2812 - RNA, 20 nt, Artificial Sequence
  SAMD9L targeting guide sequence portion
uuuugcaaauauugguuuag

SEQ ID NO: 2813 - RNA, 20 nt, Artificial Sequence
  SAMD9L targeting guide sequence portion
uuuuugcaaauauugguuua

SEQ ID NO: 2814 - RNA, 21 nt, Artificial Sequence
  SAMD9L targeting guide sequence portion
aaauauugguuuaggaggcuc

SEQ ID NO: 2815 - RNA, 21 nt, Artificial Sequence
  SAMD9L targeting guide sequence portion
aagauuuaauacacugcuggg

SEQ ID NO: 2816 - RNA, 21 nt, Artificial Sequence
  SAMD9L targeting guide sequence portion
aauacacugcugggcagagcc

SEQ ID NO: 2817 - RNA, 21 nt, Artificial Sequence
  SAMD9L targeting guide sequence portion
aauauugguuuaggaggcucu

SEQ ID NO: 2818 - RNA, 21 nt, Artificial Sequence
  SAMD9L targeting guide sequence portion
acacugcugggcagagccucc

SEQ ID NO: 2819 - RNA, 21 nt, Artificial Sequence
  SAMD9L targeting guide sequence portion
acugcugggcagagccuccua

SEQ ID NO: 2820 - RNA, 21 nt, Artificial Sequence
  SAMD9L targeting guide sequence portion
agagccuccuaaaccaauauu

SEQ ID NO: 2821 - RNA, 21 nt, Artificial Sequence
  SAMD9L targeting guide sequence portion
agauuuaauacacugcugggc

SEQ ID NO: 2822 - RNA, 21 nt, Artificial Sequence
  SAMD9L targeting guide sequence portion
agccuccuaaaccaauauuug

SEQ ID NO: 2823 - RNA, 21 nt, Artificial Sequence
  SAMD9L targeting guide sequence portion
aggaggcucugcccagcagug

SEQ ID NO: 2824 - RNA, 21 nt, Artificial Sequence
  SAMD9L targeting guide sequence portion
aggcucugcccagcaguguau

SEQ ID NO: 2825 - RNA, 21 nt, Artificial Sequence
  SAMD9L targeting guide sequence portion
auacacugcugggcagagccu

SEQ ID NO: 2826 - RNA, 21 nt, Artificial Sequence
  SAMD9L targeting guide sequence portion
auauugguuuaggaggcucug

SEQ ID NO: 2827 - RNA, 21 nt, Artificial Sequence
  SAMD9L targeting guide sequence portion
auugguuuaggaggcucugcc

SEQ ID NO: 2828 - RNA, 21 nt, Artificial Sequence
  SAMD9L targeting guide sequence portion
auuuaauacacugcugggcag

SEQ ID NO: 2829 - RNA, 21 nt, Artificial Sequence
  SAMD9L targeting guide sequence portion
caaauauugguuuaggaggcu

SEQ ID NO: 2830 - RNA, 21 nt, Artificial Sequence
  SAMD9L targeting guide sequence portion
cacugcugggcagagccuccu

SEQ ID NO: 2831 - RNA, 21 nt, Artificial Sequence
  SAMD9L targeting guide sequence portion
cagagccuccuaaaccaauau

SEQ ID NO: 2832 - RNA, 21 nt, Artificial Sequence
  SAMD9L targeting guide sequence portion
ccuccuaaaccaauauuugca

SEQ ID NO: 2833 - RNA, 21 nt, Artificial Sequence
  SAMD9L targeting guide sequence portion
cugcugggcagagccuccuaa

SEQ ID NO: 2834 - RNA, 21 nt, Artificial Sequence
  SAMD9L targeting guide sequence portion
cugggcagagccuccuaaacc

SEQ ID NO: 2835 - RNA, 21 nt, Artificial Sequence
  SAMD9L targeting guide sequence portion
gagccuccuaaaccaauauuu

SEQ ID NO: 2836 - RNA, 21 nt, Artificial Sequence
  SAMD9L targeting guide sequence portion
gaggcucugcccagcagugua

SEQ ID NO: 2837 - RNA, 21 nt, Artificial Sequence
  SAMD9L targeting guide sequence portion
gauuuaauacacugcugggca

SEQ ID NO: 2838 - RNA, 21 nt, Artificial Sequence
  SAMD9L targeting guide sequence portion
gauuuuugcaaauauugguuu

SEQ ID NO: 2839 - RNA, 21 nt, Artificial Sequence
  SAMD9L targeting guide sequence portion
gcaaauauugguuuaggaggc

SEQ ID NO: 2840 - RNA, 21 nt, Artificial Sequence
  SAMD9L targeting guide sequence portion
gcagagccuccuaaaccaaua

SEQ ID NO: 2841 - RNA, 21 nt, Artificial Sequence
  SAMD9L targeting guide sequence portion
gccuccuaaaccaauauuugc

SEQ ID NO: 2842 - RNA, 21 nt, Artificial Sequence
  SAMD9L targeting guide sequence portion
gcucugcccagcaguguauua

SEQ ID NO: 2843 - RNA, 21 nt, Artificial Sequence
  SAMD9L targeting guide sequence portion
gcugggcagagccuccuaaac

SEQ ID NO: 2844 - RNA, 21 nt, Artificial Sequence
  SAMD9L targeting guide sequence portion
ggaggcucugcccagcagugu

SEQ ID NO: 2845 - RNA, 21 nt, Artificial Sequence
  SAMD9L targeting guide sequence portion
ggcagagccuccuaaaccaau

SEQ ID NO: 2846 - RNA, 21 nt, Artificial Sequence
  SAMD9L targeting guide sequence portion
ggcucugcccagcaguguauu

SEQ ID NO: 2847 - RNA, 21 nt, Artificial Sequence
  SAMD9L targeting guide sequence portion
gggcagagccuccuaaaccaa

SEQ ID NO: 2848 - RNA, 21 nt, Artificial Sequence
  SAMD9L targeting guide sequence portion
gguuuaggaggcucugcccag

SEQ ID NO: 2849 - RNA, 21 nt, Artificial Sequence
  SAMD9L targeting guide sequence portion
guuuaggaggcucugcccagc

SEQ ID NO: 2850 - RNA, 21 nt, Artificial Sequence
  SAMD9L targeting guide sequence portion
uaauacacugcugggcagagc

SEQ ID NO: 2851 - RNA, 21 nt, Artificial Sequence
  SAMD9L targeting guide sequence portion
uacacugcugggcagagccuc

SEQ ID NO: 2852 - RNA, 21 nt, Artificial Sequence
  SAMD9L targeting guide sequence portion
uaggaggcucugcccagcagu

SEQ ID NO: 2853 - RNA, 21 nt, Artificial Sequence
  SAMD9L targeting guide sequence portion
uauugguuuaggaggcucugc

SEQ ID NO: 2854 - RNA, 21 nt, Artificial Sequence
  SAMD9L targeting guide sequence portion
ugcaaauauugguuuaggagg

SEQ ID NO: 2855 - RNA, 21 nt, Artificial Sequence
  SAMD9L targeting guide sequence portion
ugcugggcagagccuccuaaa

SEQ ID NO: 2856 - RNA, 21 nt, Artificial Sequence
  SAMD9L targeting guide sequence portion
ugggcagagccuccuaaacca

SEQ ID NO: 2857 - RNA, 21 nt, Artificial Sequence
  SAMD9L targeting guide sequence portion
ugguuuaggaggcucugccca

SEQ ID NO: 2858 - RNA, 21 nt, Artificial Sequence
  SAMD9L targeting guide sequence portion
uuaauacacugcugggcagag

SEQ ID NO: 2859 - RNA, 21 nt, Artificial Sequence
  SAMD9L targeting guide sequence portion
uuaggaggcucugcccagcag

SEQ ID NO: 2860 - RNA, 21 nt, Artificial Sequence
  SAMD9L targeting guide sequence portion
uugcaaauauugguuuaggag

SEQ ID NO: 2861 - RNA, 21 nt, Artificial Sequence
  SAMD9L targeting guide sequence portion
uugguuuaggaggcucugccc

SEQ ID NO: 2862 - RNA, 21 nt, Artificial Sequence
  SAMD9L targeting guide sequence portion
uuuaauacacugcugggcaga

SEQ ID NO: 2863 - RNA, 21 nt, Artificial Sequence
  SAMD9L targeting guide sequence portion
uuuaggaggcucugcccagca

SEQ ID NO: 2864 - RNA, 21 nt, Artificial Sequence
  SAMD9L targeting guide sequence portion
uuugcaaauauugguuuagga

SEQ ID NO: 2865 - RNA, 21 nt, Artificial Sequence
  SAMD9L targeting guide sequence portion
uuuugcaaauauugguuuagg

SEQ ID NO: 2866 - RNA, 21 nt, Artificial Sequence
  SAMD9L targeting guide sequence portion
uuuuugcaaauauugguuuag

SEQ ID NO: 2867 - RNA, 22 nt, Artificial Sequence
  SAMD9L targeting guide sequence portion
aaagauuuaauacacugcuggg

SEQ ID NO: 2868 - RNA, 22 nt, Artificial Sequence
  SAMD9L targeting guide sequence portion
aaauauugguuuaggaggcucu

SEQ ID NO: 2869 - RNA, 22 nt, Artificial Sequence
  SAMD9L targeting guide sequence portion
aagauuuaauacacugcugggc

SEQ ID NO: 2870 - RNA, 22 nt, Artificial Sequence
  SAMD9L targeting guide sequence portion
aauacacugcugggcagagccu

SEQ ID NO: 2871 - RNA, 22 nt, Artificial Sequence
  SAMD9L targeting guide sequence portion
aauauugguuuaggaggcucug

SEQ ID NO: 2872 - RNA, 22 nt, Artificial Sequence
  SAMD9L targeting guide sequence portion
acacugcugggcagagccuccu

SEQ ID NO: 2873 - RNA, 22 nt, Artificial Sequence
  SAMD9L targeting guide sequence portion
acugcugggcagagccuccuaa

SEQ ID NO: 2874 - RNA, 22 nt, Artificial Sequence
  SAMD9L targeting guide sequence portion
agagccuccuaaaccaauauuu

SEQ ID NO: 2875 - RNA, 22 nt, Artificial Sequence
  SAMD9L targeting guide sequence portion
agauuuaauacacugcugggca

SEQ ID NO: 2876 - RNA, 22 nt, Artificial Sequence
  SAMD9L targeting guide sequence portion
agccuccuaaaccaauauuugc

SEQ ID NO: 2877 - RNA, 22 nt, Artificial Sequence
  SAMD9L targeting guide sequence portion
aggaggcucugcccagcagugu

SEQ ID NO: 2878 - RNA, 22 nt, Artificial Sequence
  SAMD9L targeting guide sequence portion
aggcucugcccagcaguguauu

SEQ ID NO: 2879 - RNA, 22 nt, Artificial Sequence
  SAMD9L targeting guide sequence portion
auacacugcugggcagagccuc

SEQ ID NO: 2880 - RNA, 22 nt, Artificial Sequence
  SAMD9L targeting guide sequence portion
auauugguuuaggaggcucugc

SEQ ID NO: 2881 - RNA, 22 nt, Artificial Sequence
  SAMD9L targeting guide sequence portion
auugguuuaggaggcucugccc

SEQ ID NO: 2882 - RNA, 22 nt, Artificial Sequence
  SAMD9L targeting guide sequence portion
auuuaauacacugcugggcaga

SEQ ID NO: 2883 - RNA, 22 nt, Artificial Sequence
  SAMD9L targeting guide sequence portion
auuuuugcaaauauugguuuag

SEQ ID NO: 2884 - RNA, 22 nt, Artificial Sequence
  SAMD9L targeting guide sequence portion
caaauauugguuuaggaggcuc

SEQ ID NO: 2885 - RNA, 22 nt, Artificial Sequence
  SAMD9L targeting guide sequence portion
cacugcugggcagagccuccua

SEQ ID NO: 2886 - RNA, 22 nt, Artificial Sequence
  SAMD9L targeting guide sequence portion
cagagccuccuaaaccaauauu

SEQ ID NO: 2887 - RNA, 22 nt, Artificial Sequence
  SAMD9L targeting guide sequence portion
ccuccuaaaccaauauuugcaa

SEQ ID NO: 2888 - RNA, 22 nt, Artificial Sequence
  SAMD9L targeting guide sequence portion
cugcugggcagagccuccuaaa

SEQ ID NO: 2889 - RNA, 22 nt, Artificial Sequence
  SAMD9L targeting guide sequence portion
cugggcagagccuccuaaacca

SEQ ID NO: 2890 - RNA, 22 nt, Artificial Sequence
  SAMD9L targeting guide sequence portion
gagccuccuaaaccaauauuug

SEQ ID NO: 2891 - RNA, 22 nt, Artificial Sequence
  SAMD9L targeting guide sequence portion
gaggcucugcccagcaguguau

SEQ ID NO: 2892 - RNA, 22 nt, Artificial Sequence
  SAMD9L targeting guide sequence portion
gauuuaauacacugcugggcag

SEQ ID NO: 2893 - RNA, 22 nt, Artificial Sequence
  SAMD9L targeting guide sequence portion
gauuuuugcaaauauugguuua

SEQ ID NO: 2894 - RNA, 22 nt, Artificial Sequence
  SAMD9L targeting guide sequence portion
gcaaauauugguuuaggaggcu

SEQ ID NO: 2895 - RNA, 22 nt, Artificial Sequence
  SAMD9L targeting guide sequence portion
gcagagccuccuaaaccaauau

SEQ ID NO: 2896 - RNA, 22 nt, Artificial Sequence
  SAMD9L targeting guide sequence portion
gccuccuaaaccaauauuugca

SEQ ID NO: 2897 - RNA, 22 nt, Artificial Sequence
  SAMD9L targeting guide sequence portion
gcucugcccagcaguguauuaa

SEQ ID NO: 2898 - RNA, 22 nt, Artificial Sequence
  SAMD9L targeting guide sequence portion
gcugggcagagccuccuaaacc

SEQ ID NO: 2899 - RNA, 22 nt, Artificial Sequence
  SAMD9L targeting guide sequence portion
ggaggcucugcccagcagugua

SEQ ID NO: 2900 - RNA, 22 nt, Artificial Sequence
  SAMD9L targeting guide sequence portion
ggcagagccuccuaaaccaaua

SEQ ID NO: 2901 - RNA, 22 nt, Artificial Sequence
  SAMD9L targeting guide sequence portion
ggcucugcccagcaguguauua

SEQ ID NO: 2902 - RNA, 22 nt, Artificial Sequence
  SAMD9L targeting guide sequence portion
gggcagagccuccuaaaccaau

SEQ ID NO: 2903 - RNA, 22 nt, Artificial Sequence
  SAMD9L targeting guide sequence portion
gguuuaggaggcucugcccagc

SEQ ID NO: 2904 - RNA, 22 nt, Artificial Sequence
  SAMD9L targeting guide sequence portion
guuuaggaggcucugcccagca

SEQ ID NO: 2905 - RNA, 22 nt, Artificial Sequence
  SAMD9L targeting guide sequence portion
uaauacacugcugggcagagcc

SEQ ID NO: 2906 - RNA, 22 nt, Artificial Sequence
  SAMD9L targeting guide sequence portion
uacacugcugggcagagccucc

SEQ ID NO: 2907 - RNA, 22 nt, Artificial Sequence
  SAMD9L targeting guide sequence portion
uaggaggcucugcccagcagug

SEQ ID NO: 2908 - RNA, 22 nt, Artificial Sequence
  SAMD9L targeting guide sequence portion
uauugguuuaggaggcucugcc

SEQ ID NO: 2909 - RNA, 22 nt, Artificial Sequence
  SAMD9L targeting guide sequence portion
ugauuuuugcaaauauugguuu

SEQ ID NO: 2910 - RNA, 22 nt, Artificial Sequence
  SAMD9L targeting guide sequence portion
ugcaaauauugguuuaggaggc

SEQ ID NO: 2911 - RNA, 22 nt, Artificial Sequence
  SAMD9L targeting guide sequence portion
ugcugggcagagccuccuaaac

SEQ ID NO: 2912 - RNA, 22 nt, Artificial Sequence
  SAMD9L targeting guide sequence portion
ugggcagagccuccuaaaccaa

SEQ ID NO: 2913 - RNA, 22 nt, Artificial Sequence
  SAMD9L targeting guide sequence portion
ugguuuaggaggcucugcccag

SEQ ID NO: 2914 - RNA, 22 nt, Artificial Sequence
  SAMD9L targeting guide sequence portion
uuaauacacugcugggcagagc

SEQ ID NO: 2915 - RNA, 22 nt, Artificial Sequence
  SAMD9L targeting guide sequence portion
uuaggaggcucugcccagcagu

SEQ ID NO: 2916 - RNA, 22 nt, Artificial Sequence
  SAMD9L targeting guide sequence portion
uugcaaauauugguuuaggagg

SEQ ID NO: 2917 - RNA, 22 nt, Artificial Sequence
  SAMD9L targeting guide sequence portion
uugguuuaggaggcucugccca

SEQ ID NO: 2918 - RNA, 22 nt, Artificial Sequence
  SAMD9L targeting guide sequence portion
uuuaauacacugcugggcagag

SEQ ID NO: 2919 - RNA, 22 nt, Artificial Sequence
  SAMD9L targeting guide sequence portion
uuuaggaggcucugcccagcag

SEQ ID NO: 2920 - RNA, 22 nt, Artificial Sequence
  SAMD9L targeting guide sequence portion
uuugcaaauauugguuuaggag

SEQ ID NO: 2921 - RNA, 22 nt, Artificial Sequence
  SAMD9L targeting guide sequence portion
uuuugcaaauauugguuuagga

SEQ ID NO: 2922 - RNA, 22 nt, Artificial Sequence
  SAMD9L targeting guide sequence portion
uuuuugcaaauauugguuuagg

SEQ ID NO: 2923 - RNA, 20 nt, Artificial Sequence
  SAMD9L targeting guide sequence portion
aaaacaguucuucagauuuu

SEQ ID NO: 2924 - RNA, 20 nt, Artificial Sequence
  SAMD9L targeting guide sequence portion
aaaaucugaagaacuguuuu

SEQ ID NO: 2925 - RNA, 20 nt, Artificial Sequence
  SAMD9L targeting guide sequence portion
aaacaguucuucagauuuug

SEQ ID NO: 2926 - RNA, 20 nt, Artificial Sequence
  SAMD9L targeting guide sequence portion
aaaucugaagaacuguuuuc

SEQ ID NO: 2927 - RNA, 20 nt, Artificial Sequence
  SAMD9L targeting guide sequence portion
aacaaaaucugaagaacugu

SEQ ID NO: 2928 - RNA, 20 nt, Artificial Sequence
  SAMD9L targeting guide sequence portion
aacaguucuucagauuuugu

SEQ ID NO: 2929 - RNA, 20 nt, Artificial Sequence
  SAMD9L targeting guide sequence portion
aacuguuuucagaagaaaaa

SEQ ID NO: 2930 - RNA, 20 nt, Artificial Sequence
  SAMD9L targeting guide sequence portion
aacuucuauuuuucuucuga

SEQ ID NO: 2931 - RNA, 20 nt, Artificial Sequence
  SAMD9L targeting guide sequence portion
aagaacuguuuucagaagaa

SEQ ID NO: 2932 - RNA, 20 nt, Artificial Sequence
  SAMD9L targeting guide sequence portion
aaucugaagaacuguuuuca

SEQ ID NO: 2933 - RNA, 20 nt, Artificial Sequence
  SAMD9L targeting guide sequence portion
acaaaaucugaagaacuguu

SEQ ID NO: 2934 - RNA, 20 nt, Artificial Sequence
  SAMD9L targeting guide sequence portion
acaguucuucagauuuuguu

SEQ ID NO: 2935 - RNA, 20 nt, Artificial Sequence
  SAMD9L targeting guide sequence portion
acuguuuucagaagaaaaau

SEQ ID NO: 2936 - RNA, 20 nt, Artificial Sequence
  SAMD9L targeting guide sequence portion
acuucuauuuuucuucugaa

SEQ ID NO: 2937 - RNA, 20 nt, Artificial Sequence
  SAMD9L targeting guide sequence portion
agaacuguuuucagaagaaa

SEQ ID NO: 2938 - RNA, 20 nt, Artificial Sequence
  SAMD9L targeting guide sequence portion
aguucuucagauuuuguuaa

SEQ ID NO: 2939 - RNA, 20 nt, Artificial Sequence
  SAMD9L targeting guide sequence portion
aucugaagaacuguuuucag

SEQ ID NO: 2940 - RNA, 20 nt, Artificial Sequence
  SAMD9L targeting guide sequence portion
auuuuucuucugaaaacagu

SEQ ID NO: 2941 - RNA, 20 nt, Artificial Sequence
  SAMD9L targeting guide sequence portion
caaaaucugaagaacuguuu

SEQ ID NO: 2942 - RNA, 20 nt, Artificial Sequence
  SAMD9L targeting guide sequence portion
caguucuucagauuuuguua

SEQ ID NO: 2943 - RNA, 20 nt, Artificial Sequence
  SAMD9L targeting guide sequence portion
cccuuuuaacaaaaucugaa

SEQ ID NO: 2944 - RNA, 20 nt, Artificial Sequence
  SAMD9L targeting guide sequence portion
ccuuuuaacaaaaucugaag

SEQ ID NO: 2945 - RNA, 20 nt, Artificial Sequence
  SAMD9L targeting guide sequence portion
cuauuuuucuucugaaaaca

SEQ ID NO: 2946 - RNA, 20 nt, Artificial Sequence
  SAMD9L targeting guide sequence portion
cugaaaacaguucuucagau

SEQ ID NO: 2947 - RNA, 20 nt, Artificial Sequence
  SAMD9L targeting guide sequence portion
cugaagaacuguuuucagaa

SEQ ID NO: 2948 - RNA, 20 nt, Artificial Sequence
  SAMD9L targeting guide sequence portion
cuguuuucagaagaaaaaua

SEQ ID NO: 2949 - RNA, 20 nt, Artificial Sequence
  SAMD9L targeting guide sequence portion
cuucuauuuuucuucugaaa

SEQ ID NO: 2950 - RNA, 20 nt, Artificial Sequence
  SAMD9L targeting guide sequence portion
cuucugaaaacaguucuuca

SEQ ID NO: 2951 - RNA, 20 nt, Artificial Sequence
  SAMD9L targeting guide sequence portion
cuuuuaacaaaaucugaaga

SEQ ID NO: 2952 - RNA, 20 nt, Artificial Sequence
  SAMD9L targeting guide sequence portion
gaaaacaguucuucagauuu

SEQ ID NO: 2953 - RNA, 20 nt, Artificial Sequence
  SAMD9L targeting guide sequence portion
gaacuguuuucagaagaaaa

SEQ ID NO: 2954 - RNA, 20 nt, Artificial Sequence
  SAMD9L targeting guide sequence portion
gaagaacuguuuucagaaga

SEQ ID NO: 2955 - RNA, 20 nt, Artificial Sequence
  SAMD9L targeting guide sequence portion
gucccuuuuaacaaaaucug

SEQ ID NO: 2956 - RNA, 20 nt, Artificial Sequence
  SAMD9L targeting guide sequence portion
guucuucagauuuuguuaaa

SEQ ID NO: 2957 - RNA, 20 nt, Artificial Sequence
  SAMD9L targeting guide sequence portion
uaacaaaaucugaagaacug

SEQ ID NO: 2958 - RNA, 20 nt, Artificial Sequence
  SAMD9L targeting guide sequence portion
uauuuuucuucugaaaacag

SEQ ID NO: 2959 - RNA, 20 nt, Artificial Sequence
  SAMD9L targeting guide sequence portion
ucccuuuuaacaaaaucuga

SEQ ID NO: 2960 - RNA, 20 nt, Artificial Sequence
  SAMD9L targeting guide sequence portion
ucuauuuuucuucugaaaac

SEQ ID NO: 2961 - RNA, 20 nt, Artificial Sequence
  SAMD9L targeting guide sequence portion
ucugaaaacaguucuucaga

SEQ ID NO: 2962 - RNA, 20 nt, Artificial Sequence
  SAMD9L targeting guide sequence portion
ucugaagaacuguuuucaga

SEQ ID NO: 2963 - RNA, 20 nt, Artificial Sequence
  SAMD9L targeting guide sequence portion
ucuucugaaaacaguucuuc

SEQ ID NO: 2964 - RNA, 20 nt, Artificial Sequence
  SAMD9L targeting guide sequence portion
ugaaaacaguucuucagauu

SEQ ID NO: 2965 - RNA, 20 nt, Artificial Sequence
  SAMD9L targeting guide sequence portion
ugaagaacuguuuucagaag

SEQ ID NO: 2966 - RNA, 20 nt, Artificial Sequence
  SAMD9L targeting guide sequence portion
uuaacaaaaucugaagaacu

SEQ ID NO: 2967 - RNA, 20 nt, Artificial Sequence
  SAMD9L targeting guide sequence portion
uucuauuuuucuucugaaaa

SEQ ID NO: 2968 - RNA, 20 nt, Artificial Sequence
  SAMD9L targeting guide sequence portion
uucugaaaacaguucuucag

SEQ ID NO: 2969 - RNA, 20 nt, Artificial Sequence
  SAMD9L targeting guide sequence portion
uucuucugaaaacaguucuu

SEQ ID NO: 2970 - RNA, 20 nt, Artificial Sequence
  SAMD9L targeting guide sequence portion
uuuaacaaaaucugaagaac

SEQ ID NO: 2971 - RNA, 20 nt, Artificial Sequence
  SAMD9L targeting guide sequence portion
uuucuucugaaaacaguucu

SEQ ID NO: 2972 - RNA, 20 nt, Artificial Sequence
  SAMD9L targeting guide sequence portion
uuuuaacaaaaucugaagaa

SEQ ID NO: 2973 - RNA, 20 nt, Artificial Sequence
  SAMD9L targeting guide sequence portion
uuuucuucugaaaacaguuc

SEQ ID NO: 2974 - RNA, 20 nt, Artificial Sequence
  SAMD9L targeting guide sequence portion
uuuuucuucugaaaacaguu

SEQ ID NO: 2975 - RNA, 21 nt, Artificial Sequence
  SAMD9L targeting guide sequence portion
aaaacaguucuucagauuuug

SEQ ID NO: 2976 - RNA, 21 nt, Artificial Sequence
  SAMD9L targeting guide sequence portion
aaaaucugaagaacuguuuuc

SEQ ID NO: 2977 - RNA, 21 nt, Artificial Sequence
  SAMD9L targeting guide sequence portion
aaacaguucuucagauuuugu

SEQ ID NO: 2978 - RNA, 21 nt, Artificial Sequence
  SAMD9L targeting guide sequence portion
aaaucugaagaacuguuuuca

SEQ ID NO: 2979 - RNA, 21 nt, Artificial Sequence
  SAMD9L targeting guide sequence portion
aacaaaaucugaagaacuguu

SEQ ID NO: 2980 - RNA, 21 nt, Artificial Sequence
  SAMD9L targeting guide sequence portion
aacaguucuucagauuuuguu

SEQ ID NO: 2981 - RNA, 21 nt, Artificial Sequence
  SAMD9L targeting guide sequence portion
aacuguuuucagaagaaaaau

SEQ ID NO: 2982 - RNA, 21 nt, Artificial Sequence
  SAMD9L targeting guide sequence portion
aacuucuauuuuucuucugaa

SEQ ID NO: 2983 - RNA, 21 nt, Artificial Sequence
  SAMD9L targeting guide sequence portion
aagaacuguuuucagaagaaa

SEQ ID NO: 2984 - RNA, 21 nt, Artificial Sequence
  SAMD9L targeting guide sequence portion
aaucugaagaacuguuuucag

SEQ ID NO: 2985 - RNA, 21 nt, Artificial Sequence
  SAMD9L targeting guide sequence portion
acaaaaucugaagaacuguuu

SEQ ID NO: 2986 - RNA, 21 nt, Artificial Sequence
  SAMD9L targeting guide sequence portion
acaguucuucagauuuuguua

SEQ ID NO: 2987 - RNA, 21 nt, Artificial Sequence
  SAMD9L targeting guide sequence portion
acuguuuucagaagaaaaaua

SEQ ID NO: 2988 - RNA, 21 nt, Artificial Sequence
  SAMD9L targeting guide sequence portion
acuucuauuuuucuucugaaa

SEQ ID NO: 2989 - RNA, 21 nt, Artificial Sequence
  SAMD9L targeting guide sequence portion
agaacuguuuucagaagaaaa

SEQ ID NO: 2990 - RNA, 21 nt, Artificial Sequence
  SAMD9L targeting guide sequence portion
aguucuucagauuuuguuaaa

SEQ ID NO: 2991 - RNA, 21 nt, Artificial Sequence
  SAMD9L targeting guide sequence portion
aucugaagaacuguuuucaga

SEQ ID NO: 2992 - RNA, 21 nt, Artificial Sequence
  SAMD9L targeting guide sequence portion
auuuuucuucugaaaacaguu

SEQ ID NO: 2993 - RNA, 21 nt, Artificial Sequence
  SAMD9L targeting guide sequence portion
caaaaucugaagaacuguuuu

SEQ ID NO: 2994 - RNA, 21 nt, Artificial Sequence
  SAMD9L targeting guide sequence portion
caguucuucagauuuuguuaa

SEQ ID NO: 2995 - RNA, 21 nt, Artificial Sequence
  SAMD9L targeting guide sequence portion
cccuuuuaacaaaaucugaag

SEQ ID NO: 2996 - RNA, 21 nt, Artificial Sequence
  SAMD9L targeting guide sequence portion
ccuuuuaacaaaaucugaaga

SEQ ID NO: 2997 - RNA, 21 nt, Artificial Sequence
  SAMD9L targeting guide sequence portion
cuauuuuucuucugaaaacag

SEQ ID NO: 2998 - RNA, 21 nt, Artificial Sequence
  SAMD9L targeting guide sequence portion
cugaaaacaguucuucagauu

SEQ ID NO: 2999 - RNA, 21 nt, Artificial Sequence
  SAMD9L targeting guide sequence portion
cugaagaacuguuuucagaag

SEQ ID NO: 3000 - RNA, 21 nt, Artificial Sequence
  SAMD9L targeting guide sequence portion
cuguuuucagaagaaaaauag

SEQ ID NO: 3001 - RNA, 21 nt, Artificial Sequence
  SAMD9L targeting guide sequence portion
cuucuauuuuucuucugaaaa

SEQ ID NO: 3002 - RNA, 21 nt, Artificial Sequence
  SAMD9L targeting guide sequence portion
cuucugaaaacaguucuucag

SEQ ID NO: 3003 - RNA, 21 nt, Artificial Sequence
  SAMD9L targeting guide sequence portion
cuuuuaacaaaaucugaagaa

SEQ ID NO: 3004 - RNA, 21 nt, Artificial Sequence
  SAMD9L targeting guide sequence portion
gaaaacaguucuucagauuuu

SEQ ID NO: 3005 - RNA, 21 nt, Artificial Sequence
  SAMD9L targeting guide sequence portion
gaacuguuuucagaagaaaaa

SEQ ID NO: 3006 - RNA, 21 nt, Artificial Sequence
  SAMD9L targeting guide sequence portion
gaacuucuauuuuucuucuga

SEQ ID NO: 3007 - RNA, 21 nt, Artificial Sequence
  SAMD9L targeting guide sequence portion
gaagaacuguuuucagaagaa

SEQ ID NO: 3008 - RNA, 21 nt, Artificial Sequence
  SAMD9L targeting guide sequence portion
gucccuuuuaacaaaaucuga

SEQ ID NO: 3009 - RNA, 21 nt, Artificial Sequence
  SAMD9L targeting guide sequence portion
guucuucagauuuuguuaaaa

SEQ ID NO: 3010 - RNA, 21 nt, Artificial Sequence
  SAMD9L targeting guide sequence portion
uaacaaaaucugaagaacugu

SEQ ID NO: 3011 - RNA, 21 nt, Artificial Sequence
  SAMD9L targeting guide sequence portion
uauuuuucuucugaaaacagu

SEQ ID NO: 3012 - RNA, 21 nt, Artificial Sequence
  SAMD9L targeting guide sequence portion
ucccuuuuaacaaaaucugaa

SEQ ID NO: 3013 - RNA, 21 nt, Artificial Sequence
  SAMD9L targeting guide sequence portion
ucuauuuuucuucugaaaaca

SEQ ID NO: 3014 - RNA, 21 nt, Artificial Sequence
  SAMD9L targeting guide sequence portion
ucugaaaacaguucuucagau

SEQ ID NO: 3015 - RNA, 21 nt, Artificial Sequence
  SAMD9L targeting guide sequence portion
ucugaagaacuguuuucagaa

SEQ ID NO: 3016 - RNA, 21 nt, Artificial Sequence
  SAMD9L targeting guide sequence portion
ucuucugaaaacaguucuuca

SEQ ID NO: 3017 - RNA, 21 nt, Artificial Sequence
  SAMD9L targeting guide sequence portion
ugaaaacaguucuucagauuu

SEQ ID NO: 3018 - RNA, 21 nt, Artificial Sequence
  SAMD9L targeting guide sequence portion
ugaagaacuguuuucagaaga

SEQ ID NO: 3019 - RNA, 21 nt, Artificial Sequence
  SAMD9L targeting guide sequence portion
ugucccuuuuaacaaaaucug

SEQ ID NO: 3020 - RNA, 21 nt, Artificial Sequence
  SAMD9L targeting guide sequence portion
uuaacaaaaucugaagaacug

SEQ ID NO: 3021 - RNA, 21 nt, Artificial Sequence
  SAMD9L targeting guide sequence portion
uucuauuuuucuucugaaaac

SEQ ID NO: 3022 - RNA, 21 nt, Artificial Sequence
  SAMD9L targeting guide sequence portion
uucugaaaacaguucuucaga

SEQ ID NO: 3023 - RNA, 21 nt, Artificial Sequence
  SAMD9L targeting guide sequence portion
uucuucugaaaacaguucuuc

SEQ ID NO: 3024 - RNA, 21 nt, Artificial Sequence
  SAMD9L targeting guide sequence portion
uuuaacaaaaucugaagaacu

SEQ ID NO: 3025 - RNA, 21 nt, Artificial Sequence
  SAMD9L targeting guide sequence portion
uuucuucugaaaacaguucuu

SEQ ID NO: 3026 - RNA, 21 nt, Artificial Sequence
  SAMD9L targeting guide sequence portion
uuuuaacaaaaucugaagaac

SEQ ID NO: 3027 - RNA, 21 nt, Artificial Sequence
  SAMD9L targeting guide sequence portion
uuuucuucugaaaacaguucu

SEQ ID NO: 3028 - RNA, 21 nt, Artificial Sequence
  SAMD9L targeting guide sequence portion
uuuuucuucugaaaacaguuc

SEQ ID NO: 3029 - RNA, 22 nt, Artificial Sequence
  SAMD9L targeting guide sequence portion
aaaacaguucuucagauuuugu

SEQ ID NO: 3030 - RNA, 22 nt, Artificial Sequence
  SAMD9L targeting guide sequence portion
aaaaucugaagaacuguuuuca

SEQ ID NO: 3031 - RNA, 22 nt, Artificial Sequence
  SAMD9L targeting guide sequence portion
aaacaguucuucagauuuuguu

SEQ ID NO: 3032 - RNA, 22 nt, Artificial Sequence
  SAMD9L targeting guide sequence portion
aaaucugaagaacuguuuucag

SEQ ID NO: 3033 - RNA, 22 nt, Artificial Sequence
  SAMD9L targeting guide sequence portion
aacaaaaucugaagaacuguuu

SEQ ID NO: 3034 - RNA, 22 nt, Artificial Sequence
  SAMD9L targeting guide sequence portion
aacaguucuucagauuuuguua

SEQ ID NO: 3035 - RNA, 22 nt, Artificial Sequence
  SAMD9L targeting guide sequence portion
aacuguuuucagaagaaaaaua

SEQ ID NO: 3036 - RNA, 22 nt, Artificial Sequence
  SAMD9L targeting guide sequence portion
aacuucuauuuuucuucugaaa

SEQ ID NO: 3037 - RNA, 22 nt, Artificial Sequence
  SAMD9L targeting guide sequence portion
aagaacuguuuucagaagaaaa

SEQ ID NO: 3038 - RNA, 22 nt, Artificial Sequence
  SAMD9L targeting guide sequence portion
aaucugaagaacuguuuucaga

SEQ ID NO: 3039 - RNA, 22 nt, Artificial Sequence
  SAMD9L targeting guide sequence portion
acaaaaucugaagaacuguuuu

SEQ ID NO: 3040 - RNA, 22 nt, Artificial Sequence
  SAMD9L targeting guide sequence portion
acaguucuucagauuuuguuaa

SEQ ID NO: 3041 - RNA, 22 nt, Artificial Sequence
  SAMD9L targeting guide sequence portion
acuguuuucagaagaaaaauag

SEQ ID NO: 3042 - RNA, 22 nt, Artificial Sequence
  SAMD9L targeting guide sequence portion
acuucuauuuuucuucugaaaa

SEQ ID NO: 3043 - RNA, 22 nt, Artificial Sequence
  SAMD9L targeting guide sequence portion
agaacuguuuucagaagaaaaa

SEQ ID NO: 3044 - RNA, 22 nt, Artificial Sequence
  SAMD9L targeting guide sequence portion
aguucuucagauuuuguuaaaa

SEQ ID NO: 3045 - RNA, 22 nt, Artificial Sequence
  SAMD9L targeting guide sequence portion
aucugaagaacuguuuucagaa

SEQ ID NO: 3046 - RNA, 22 nt, Artificial Sequence
  SAMD9L targeting guide sequence portion
auuuuucuucugaaaacaguuc

SEQ ID NO: 3047 - RNA, 22 nt, Artificial Sequence
  SAMD9L targeting guide sequence portion
caaaaucugaagaacuguuuuc

SEQ ID NO: 3048 - RNA, 22 nt, Artificial Sequence
  SAMD9L targeting guide sequence portion
caguucuucagauuuuguuaaa

SEQ ID NO: 3049 - RNA, 22 nt, Artificial Sequence
  SAMD9L targeting guide sequence portion
cccuuuuaacaaaaucugaaga

SEQ ID NO: 3050 - RNA, 22 nt, Artificial Sequence
  SAMD9L targeting guide sequence portion
ccuuuuaacaaaaucugaagaa

SEQ ID NO: 3051 - RNA, 22 nt, Artificial Sequence
  SAMD9L targeting guide sequence portion
cuauuuuucuucugaaaacagu

SEQ ID NO: 3052 - RNA, 22 nt, Artificial Sequence
  SAMD9L targeting guide sequence portion
cugaaaacaguucuucagauuu

SEQ ID NO: 3053 - RNA, 22 nt, Artificial Sequence
  SAMD9L targeting guide sequence portion
cugaagaacuguuuucagaaga

SEQ ID NO: 3054 - RNA, 22 nt, Artificial Sequence
  SAMD9L targeting guide sequence portion
cugucccuuuuaacaaaaucug

SEQ ID NO: 3055 - RNA, 22 nt, Artificial Sequence
  SAMD9L targeting guide sequence portion
cuguuuucagaagaaaaauaga

SEQ ID NO: 3056 - RNA, 22 nt, Artificial Sequence
  SAMD9L targeting guide sequence portion
cuucuauuuuucuucugaaaac

SEQ ID NO: 3057 - RNA, 22 nt, Artificial Sequence
  SAMD9L targeting guide sequence portion
cuucugaaaacaguucuucaga

SEQ ID NO: 3058 - RNA, 22 nt, Artificial Sequence
  SAMD9L targeting guide sequence portion
cuuuuaacaaaaucugaagaac

SEQ ID NO: 3059 - RNA, 22 nt, Artificial Sequence
  SAMD9L targeting guide sequence portion
gaaaacaguucuucagauuuug

SEQ ID NO: 3060 - RNA, 22 nt, Artificial Sequence
  SAMD9L targeting guide sequence portion
gaacuguuuucagaagaaaaau

SEQ ID NO: 3061 - RNA, 22 nt, Artificial Sequence
  SAMD9L targeting guide sequence portion
gaacuucuauuuuucuucugaa

SEQ ID NO: 3062 - RNA, 22 nt, Artificial Sequence
  SAMD9L targeting guide sequence portion
gaagaacuguuuucagaagaaa

SEQ ID NO: 3063 - RNA, 22 nt, Artificial Sequence
  SAMD9L targeting guide sequence portion
ggaacuucuauuuuucuucuga

SEQ ID NO: 3064 - RNA, 22 nt, Artificial Sequence
  SAMD9L targeting guide sequence portion
gucccuuuuaacaaaaucugaa

SEQ ID NO: 3065 - RNA, 22 nt, Artificial Sequence
  SAMD9L targeting guide sequence portion
guucuucagauuuuguuaaaag

SEQ ID NO: 3066 - RNA, 22 nt, Artificial Sequence
  SAMD9L targeting guide sequence portion
uaacaaaaucugaagaacuguu

SEQ ID NO: 3067 - RNA, 22 nt, Artificial Sequence
  SAMD9L targeting guide sequence portion
uauuuuucuucugaaaacaguu

SEQ ID NO: 3068 - RNA, 22 nt, Artificial Sequence
  SAMD9L targeting guide sequence portion
ucccuuuuaacaaaaucugaag

SEQ ID NO: 3069 - RNA, 22 nt, Artificial Sequence
  SAMD9L targeting guide sequence portion
ucuauuuuucuucugaaaacag

SEQ ID NO: 3070 - RNA, 22 nt, Artificial Sequence
  SAMD9L targeting guide sequence portion
ucugaaaacaguucuucagauu

SEQ ID NO: 3071 - RNA, 22 nt, Artificial Sequence
  SAMD9L targeting guide sequence portion
ucugaagaacuguuuucagaag

SEQ ID NO: 3072 - RNA, 22 nt, Artificial Sequence
  SAMD9L targeting guide sequence portion
ucuucugaaaacaguucuucag

SEQ ID NO: 3073 - RNA, 22 nt, Artificial Sequence
  SAMD9L targeting guide sequence portion
ugaaaacaguucuucagauuuu

SEQ ID NO: 3074 - RNA, 22 nt, Artificial Sequence
  SAMD9L targeting guide sequence portion
ugaagaacuguuuucagaagaa

SEQ ID NO: 3075 - RNA, 22 nt, Artificial Sequence
  SAMD9L targeting guide sequence portion
ugucccuuuuaacaaaaucuga

SEQ ID NO: 3076 - RNA, 22 nt, Artificial Sequence
  SAMD9L targeting guide sequence portion
uuaacaaaaucugaagaacugu

SEQ ID NO: 3077 - RNA, 22 nt, Artificial Sequence
  SAMD9L targeting guide sequence portion
uucuauuuuucuucugaaaaca

SEQ ID NO: 3078 - RNA, 22 nt, Artificial Sequence
  SAMD9L targeting guide sequence portion
uucugaaaacaguucuucagau

SEQ ID NO: 3079 - RNA, 22 nt, Artificial Sequence
  SAMD9L targeting guide sequence portion
uucuucugaaaacaguucuuca

SEQ ID NO: 3080 - RNA, 22 nt, Artificial Sequence
  SAMD9L targeting guide sequence portion
uuuaacaaaaucugaagaacug

SEQ ID NO: 3081 - RNA, 22 nt, Artificial Sequence
  SAMD9L targeting guide sequence portion
uuucuucugaaaacaguucuuc

SEQ ID NO: 3082 - RNA, 22 nt, Artificial Sequence
  SAMD9L targeting guide sequence portion
uuuuaacaaaaucugaagaacu

SEQ ID NO: 3083 - RNA, 22 nt, Artificial Sequence
  SAMD9L targeting guide sequence portion
uuuucuucugaaaacaguucuu

SEQ ID NO: 3084 - RNA, 22 nt, Artificial Sequence
  SAMD9L targeting guide sequence portion
uuuuucuucugaaaacaguucu

SEQ ID NO: 3085 - RNA, 20 nt, Artificial Sequence
  SAMD9L targeting guide sequence portion
aaaagaagaacacuuuuauu

SEQ ID NO: 3086 - RNA, 20 nt, Artificial Sequence
  SAMD9L targeting guide sequence portion
aaagaagaacacuuuuauug

SEQ ID NO: 3087 - RNA, 20 nt, Artificial Sequence
  SAMD9L targeting guide sequence portion
aaaucaaaagaagaacacuu

SEQ ID NO: 3088 - RNA, 20 nt, Artificial Sequence
  SAMD9L targeting guide sequence portion
aacacuuuuauugagguggc

SEQ ID NO: 3089 - RNA, 20 nt, Artificial Sequence
  SAMD9L targeting guide sequence portion
aagaacacuuuuauugaggu

SEQ ID NO: 3090 - RNA, 20 nt, Artificial Sequence
  SAMD9L targeting guide sequence portion
aagaagaacacuuuuauuga

SEQ ID NO: 3091 - RNA, 20 nt, Artificial Sequence
  SAMD9L targeting guide sequence portion
aauaaaaguguucuucuuuu

SEQ ID NO: 3092 - RNA, 20 nt, Artificial Sequence
  SAMD9L targeting guide sequence portion
aaucaaaagaagaacacuuu

SEQ ID NO: 3093 - RNA, 20 nt, Artificial Sequence
  SAMD9L targeting guide sequence portion
acacuuuuauugagguggca

SEQ ID NO: 3094 - RNA, 20 nt, Artificial Sequence
  SAMD9L targeting guide sequence portion
accaggauacuuugccaccu

SEQ ID NO: 3095 - RNA, 20 nt, Artificial Sequence
  SAMD9L targeting guide sequence portion
accucaauaaaaguguucuu

SEQ ID NO: 3096 - RNA, 20 nt, Artificial Sequence
  SAMD9L targeting guide sequence portion
acuuugccaccucaauaaaa

SEQ ID NO: 3097 - RNA, 20 nt, Artificial Sequence
  SAMD9L targeting guide sequence portion
acuuuuauugagguggcaaa

SEQ ID NO: 3098 - RNA, 20 nt, Artificial Sequence
  SAMD9L targeting guide sequence portion
agaacacuuuuauugaggug

SEQ ID NO: 3099 - RNA, 20 nt, Artificial Sequence
  SAMD9L targeting guide sequence portion
agaagaacacuuuuauugag

SEQ ID NO: 3100 - RNA, 20 nt, Artificial Sequence
  SAMD9L targeting guide sequence portion
aggauacuuugccaccucaa

SEQ ID NO: 3101 - RNA, 20 nt, Artificial Sequence
  SAMD9L targeting guide sequence portion
auacuuugccaccucaauaa

SEQ ID NO: 3102 - RNA, 20 nt, Artificial Sequence
  SAMD9L targeting guide sequence portion
aucaaaagaagaacacuuuu

SEQ ID NO: 3103 - RNA, 20 nt, Artificial Sequence
  SAMD9L targeting guide sequence portion
auugagguggcaaaguaucc

SEQ ID NO: 3104 - RNA, 20 nt, Artificial Sequence
  SAMD9L targeting guide sequence portion
caaaagaagaacacuuuuau

SEQ ID NO: 3105 - RNA, 20 nt, Artificial Sequence
  SAMD9L targeting guide sequence portion
caauaaaaguguucuucuuu

SEQ ID NO: 3106 - RNA, 20 nt, Artificial Sequence
  SAMD9L targeting guide sequence portion
caccaggauacuuugccacc

SEQ ID NO: 3107 - RNA, 20 nt, Artificial Sequence
  SAMD9L targeting guide sequence portion
caccucaauaaaaguguucu

SEQ ID NO: 3108 - RNA, 20 nt, Artificial Sequence
  SAMD9L targeting guide sequence portion
cacuuuuauugagguggcaa

SEQ ID NO: 3109 - RNA, 20 nt, Artificial Sequence
  SAMD9L targeting guide sequence portion
caggauacuuugccaccuca

SEQ ID NO: 3110 - RNA, 20 nt, Artificial Sequence
  SAMD9L targeting guide sequence portion
ccaccaggauacuuugccac

SEQ ID NO: 3111 - RNA, 20 nt, Artificial Sequence
  SAMD9L targeting guide sequence portion
ccaccucaauaaaaguguuc

SEQ ID NO: 3112 - RNA, 20 nt, Artificial Sequence
  SAMD9L targeting guide sequence portion
ccaggauacuuugccaccuc

SEQ ID NO: 3113 - RNA, 20 nt, Artificial Sequence
  SAMD9L targeting guide sequence portion
ccucaauaaaaguguucuuc

SEQ ID NO: 3114 - RNA, 20 nt, Artificial Sequence
  SAMD9L targeting guide sequence portion
cucaauaaaaguguucuucu

SEQ ID NO: 3115 - RNA, 20 nt, Artificial Sequence
  SAMD9L targeting guide sequence portion
cuuugccaccucaauaaaag

SEQ ID NO: 3116 - RNA, 20 nt, Artificial Sequence
  SAMD9L targeting guide sequence portion
cuuuuauugagguggcaaag

SEQ ID NO: 3117 - RNA, 20 nt, Artificial Sequence
  SAMD9L targeting guide sequence portion
gaaaucaaaagaagaacacu

SEQ ID NO: 3118 - RNA, 20 nt, Artificial Sequence
  SAMD9L targeting guide sequence portion
gaacacuuuuauugaggugg

SEQ ID NO: 3119 - RNA, 20 nt, Artificial Sequence
  SAMD9L targeting guide sequence portion
gaagaacacuuuuauugagg

SEQ ID NO: 3120 - RNA, 20 nt, Artificial Sequence
  SAMD9L targeting guide sequence portion
gauacuuugccaccucaaua

SEQ ID NO: 3121 - RNA, 20 nt, Artificial Sequence
  SAMD9L targeting guide sequence portion
gccaccucaauaaaaguguu

SEQ ID NO: 3122 - RNA, 20 nt, Artificial Sequence
  SAMD9L targeting guide sequence portion
ggauacuuugccaccucaau

SEQ ID NO: 3123 - RNA, 20 nt, Artificial Sequence
  SAMD9L targeting guide sequence portion
uacuuugccaccucaauaaa

SEQ ID NO: 3124 - RNA, 20 nt, Artificial Sequence
  SAMD9L targeting guide sequence portion
uauugagguggcaaaguauc

SEQ ID NO: 3125 - RNA, 20 nt, Artificial Sequence
  SAMD9L targeting guide sequence portion
ucaaaagaagaacacuuuua

SEQ ID NO: 3126 - RNA, 20 nt, Artificial Sequence
  SAMD9L targeting guide sequence portion
ucaauaaaaguguucuucuu

SEQ ID NO: 3127 - RNA, 20 nt, Artificial Sequence
  SAMD9L targeting guide sequence portion
uccaccaggauacuuugcca

SEQ ID NO: 3128 - RNA, 20 nt, Artificial Sequence
  SAMD9L targeting guide sequence portion
ugagguggcaaaguauccug

SEQ ID NO: 3129 - RNA, 20 nt, Artificial Sequence
  SAMD9L targeting guide sequence portion
ugccaccucaauaaaagugu

SEQ ID NO: 3130 - RNA, 20 nt, Artificial Sequence
  SAMD9L targeting guide sequence portion
uuauugagguggcaaaguau

SEQ ID NO: 3131 - RNA, 20 nt, Artificial Sequence
  SAMD9L targeting guide sequence portion
uuccaccaggauacuuugcc

SEQ ID NO: 3132 - RNA, 20 nt, Artificial Sequence
  SAMD9L targeting guide sequence portion
uugagguggcaaaguauccu

SEQ ID NO: 3133 - RNA, 20 nt, Artificial Sequence
  SAMD9L targeting guide sequence portion
uugccaccucaauaaaagug

SEQ ID NO: 3134 - RNA, 20 nt, Artificial Sequence
  SAMD9L targeting guide sequence portion
uuuauugagguggcaaagua

SEQ ID NO: 3135 - RNA, 20 nt, Artificial Sequence
  SAMD9L targeting guide sequence portion
uuugccaccucaauaaaagu

SEQ ID NO: 3136 - RNA, 20 nt, Artificial Sequence
  SAMD9L targeting guide sequence portion
uuuuauugagguggcaaagu

SEQ ID NO: 3137 - RNA, 21 nt, Artificial Sequence
  SAMD9L targeting guide sequence portion
aaaagaagaacacuuuuauug

SEQ ID NO: 3138 - RNA, 21 nt, Artificial Sequence
  SAMD9L targeting guide sequence portion
aaagaagaacacuuuuauuga

SEQ ID NO: 3139 - RNA, 21 nt, Artificial Sequence
  SAMD9L targeting guide sequence portion
aaaucaaaagaagaacacuuu

SEQ ID NO: 3140 - RNA, 21 nt, Artificial Sequence
  SAMD9L targeting guide sequence portion
aacacuuuuauugagguggca

SEQ ID NO: 3141 - RNA, 21 nt, Artificial Sequence
  SAMD9L targeting guide sequence portion
aagaacacuuuuauugaggug

SEQ ID NO: 3142 - RNA, 21 nt, Artificial Sequence
  SAMD9L targeting guide sequence portion
aagaagaacacuuuuauugag

SEQ ID NO: 3143 - RNA, 21 nt, Artificial Sequence
  SAMD9L targeting guide sequence portion
aauaaaaguguucuucuuuug

SEQ ID NO: 3144 - RNA, 21 nt, Artificial Sequence
  SAMD9L targeting guide sequence portion
aaucaaaagaagaacacuuuu

SEQ ID NO: 3145 - RNA, 21 nt, Artificial Sequence
  SAMD9L targeting guide sequence portion
acacuuuuauugagguggcaa

SEQ ID NO: 3146 - RNA, 21 nt, Artificial Sequence
  SAMD9L targeting guide sequence portion
accaggauacuuugccaccuc

SEQ ID NO: 3147 - RNA, 21 nt, Artificial Sequence
  SAMD9L targeting guide sequence portion
accucaauaaaaguguucuuc

SEQ ID NO: 3148 - RNA, 21 nt, Artificial Sequence
  SAMD9L targeting guide sequence portion
acuuugccaccucaauaaaag

SEQ ID NO: 3149 - RNA, 21 nt, Artificial Sequence
  SAMD9L targeting guide sequence portion
acuuuuauugagguggcaaag

SEQ ID NO: 3150 - RNA, 21 nt, Artificial Sequence
  SAMD9L targeting guide sequence portion
agaaaucaaaagaagaacacu

SEQ ID NO: 3151 - RNA, 21 nt, Artificial Sequence
  SAMD9L targeting guide sequence portion
agaacacuuuuauugaggugg

SEQ ID NO: 3152 - RNA, 21 nt, Artificial Sequence
  SAMD9L targeting guide sequence portion
agaagaacacuuuuauugagg

SEQ ID NO: 3153 - RNA, 21 nt, Artificial Sequence
  SAMD9L targeting guide sequence portion
aggauacuuugccaccucaau

SEQ ID NO: 3154 - RNA, 21 nt, Artificial Sequence
  SAMD9L targeting guide sequence portion
auacuuugccaccucaauaaa

SEQ ID NO: 3155 - RNA, 21 nt, Artificial Sequence
  SAMD9L targeting guide sequence portion
aucaaaagaagaacacuuuua

SEQ ID NO: 3156 - RNA, 21 nt, Artificial Sequence
  SAMD9L targeting guide sequence portion
auugagguggcaaaguauccu

SEQ ID NO: 3157 - RNA, 21 nt, Artificial Sequence
  SAMD9L targeting guide sequence portion
caaaagaagaacacuuuuauu

SEQ ID NO: 3158 - RNA, 21 nt, Artificial Sequence
  SAMD9L targeting guide sequence portion
caauaaaaguguucuucuuuu

SEQ ID NO: 3159 - RNA, 21 nt, Artificial Sequence
  SAMD9L targeting guide sequence portion
caccaggauacuuugccaccu

SEQ ID NO: 3160 - RNA, 21 nt, Artificial Sequence
  SAMD9L targeting guide sequence portion
caccucaauaaaaguguucuu

SEQ ID NO: 3161 - RNA, 21 nt, Artificial Sequence
  SAMD9L targeting guide sequence portion
cacuuuuauugagguggcaaa

SEQ ID NO: 3162 - RNA, 21 nt, Artificial Sequence
  SAMD9L targeting guide sequence portion
caggauacuuugccaccucaa

SEQ ID NO: 3163 - RNA, 21 nt, Artificial Sequence
  SAMD9L targeting guide sequence portion
ccaccaggauacuuugccacc

SEQ ID NO: 3164 - RNA, 21 nt, Artificial Sequence
  SAMD9L targeting guide sequence portion
ccaccucaauaaaaguguucu

SEQ ID NO: 3165 - RNA, 21 nt, Artificial Sequence
  SAMD9L targeting guide sequence portion
ccaggauacuuugccaccuca

SEQ ID NO: 3166 - RNA, 21 nt, Artificial Sequence
  SAMD9L targeting guide sequence portion
ccucaauaaaaguguucuucu

SEQ ID NO: 3167 - RNA, 21 nt, Artificial Sequence
  SAMD9L targeting guide sequence portion
cucaauaaaaguguucuucuu

SEQ ID NO: 3168 - RNA, 21 nt, Artificial Sequence
  SAMD9L targeting guide sequence portion
cuuugccaccucaauaaaagu

SEQ ID NO: 3169 - RNA, 21 nt, Artificial Sequence
  SAMD9L targeting guide sequence portion
cuuuuauugagguggcaaagu

SEQ ID NO: 3170 - RNA, 21 nt, Artificial Sequence
  SAMD9L targeting guide sequence portion
gaaaucaaaagaagaacacuu

SEQ ID NO: 3171 - RNA, 21 nt, Artificial Sequence
  SAMD9L targeting guide sequence portion
gaacacuuuuauugagguggc

SEQ ID NO: 3172 - RNA, 21 nt, Artificial Sequence
  SAMD9L targeting guide sequence portion
gaagaacacuuuuauugaggu

SEQ ID NO: 3173 - RNA, 21 nt, Artificial Sequence
  SAMD9L targeting guide sequence portion
gauacuuugccaccucaauaa

SEQ ID NO: 3174 - RNA, 21 nt, Artificial Sequence
  SAMD9L targeting guide sequence portion
gccaccucaauaaaaguguuc

SEQ ID NO: 3175 - RNA, 21 nt, Artificial Sequence
  SAMD9L targeting guide sequence portion
ggauacuuugccaccucaaua

SEQ ID NO: 3176 - RNA, 21 nt, Artificial Sequence
  SAMD9L targeting guide sequence portion
guuccaccaggauacuuugcc

SEQ ID NO: 3177 - RNA, 21 nt, Artificial Sequence
  SAMD9L targeting guide sequence portion
uacuuugccaccucaauaaaa

SEQ ID NO: 3178 - RNA, 21 nt, Artificial Sequence
  SAMD9L targeting guide sequence portion
uauugagguggcaaaguaucc

SEQ ID NO: 3179 - RNA, 21 nt, Artificial Sequence
  SAMD9L targeting guide sequence portion
ucaaaagaagaacacuuuuau

SEQ ID NO: 3180 - RNA, 21 nt, Artificial Sequence
  SAMD9L targeting guide sequence portion
ucaauaaaaguguucuucuuu

SEQ ID NO: 3181 - RNA, 21 nt, Artificial Sequence
  SAMD9L targeting guide sequence portion
uccaccaggauacuuugccac

SEQ ID NO: 3182 - RNA, 21 nt, Artificial Sequence
  SAMD9L targeting guide sequence portion
ugagguggcaaaguauccugg

SEQ ID NO: 3183 - RNA, 21 nt, Artificial Sequence
  SAMD9L targeting guide sequence portion
ugccaccucaauaaaaguguu

SEQ ID NO: 3184 - RNA, 21 nt, Artificial Sequence
  SAMD9L targeting guide sequence portion
uuauugagguggcaaaguauc

SEQ ID NO: 3185 - RNA, 21 nt, Artificial Sequence
  SAMD9L targeting guide sequence portion
uuccaccaggauacuuugcca

SEQ ID NO: 3186 - RNA, 21 nt, Artificial Sequence
  SAMD9L targeting guide sequence portion
uugagguggcaaaguauccug

SEQ ID NO: 3187 - RNA, 21 nt, Artificial Sequence
  SAMD9L targeting guide sequence portion
uugccaccucaauaaaagugu

SEQ ID NO: 3188 - RNA, 21 nt, Artificial Sequence
  SAMD9L targeting guide sequence portion
uuuauugagguggcaaaguau

SEQ ID NO: 3189 - RNA, 21 nt, Artificial Sequence
  SAMD9L targeting guide sequence portion
uuugccaccucaauaaaagug

SEQ ID NO: 3190 - RNA, 21 nt, Artificial Sequence
  SAMD9L targeting guide sequence portion
uuuuauugagguggcaaagua

SEQ ID NO: 3191 - RNA, 22 nt, Artificial Sequence
  SAMD9L targeting guide sequence portion
aaaagaagaacacuuuuauuga

SEQ ID NO: 3192 - RNA, 22 nt, Artificial Sequence
  SAMD9L targeting guide sequence portion
aaagaagaacacuuuuauugag

SEQ ID NO: 3193 - RNA, 22 nt, Artificial Sequence
  SAMD9L targeting guide sequence portion
aaaucaaaagaagaacacuuuu

SEQ ID NO: 3194 - RNA, 22 nt, Artificial Sequence
  SAMD9L targeting guide sequence portion
aacacuuuuauugagguggcaa

SEQ ID NO: 3195 - RNA, 22 nt, Artificial Sequence
  SAMD9L targeting guide sequence portion
aagaaaucaaaagaagaacacu

SEQ ID NO: 3196 - RNA, 22 nt, Artificial Sequence
  SAMD9L targeting guide sequence portion
aagaacacuuuuauugaggugg

SEQ ID NO: 3197 - RNA, 22 nt, Artificial Sequence
  SAMD9L targeting guide sequence portion
aagaagaacacuuuuauugagg

SEQ ID NO: 3198 - RNA, 22 nt, Artificial Sequence
  SAMD9L targeting guide sequence portion
aauaaaaguguucuucuuuuga

SEQ ID NO: 3199 - RNA, 22 nt, Artificial Sequence
  SAMD9L targeting guide sequence portion
aaucaaaagaagaacacuuuua

SEQ ID NO: 3200 - RNA, 22 nt, Artificial Sequence
  SAMD9L targeting guide sequence portion
acacuuuuauugagguggcaaa

SEQ ID NO: 3201 - RNA, 22 nt, Artificial Sequence
  SAMD9L targeting guide sequence portion
accaggauacuuugccaccuca

SEQ ID NO: 3202 - RNA, 22 nt, Artificial Sequence
  SAMD9L targeting guide sequence portion
accucaauaaaaguguucuucu

SEQ ID NO: 3203 - RNA, 22 nt, Artificial Sequence
  SAMD9L targeting guide sequence portion
acuuugccaccucaauaaaagu

SEQ ID NO: 3204 - RNA, 22 nt, Artificial Sequence
  SAMD9L targeting guide sequence portion
acuuuuauugagguggcaaagu

SEQ ID NO: 3205 - RNA, 22 nt, Artificial Sequence
  SAMD9L targeting guide sequence portion
agaaaucaaaagaagaacacuu

SEQ ID NO: 3206 - RNA, 22 nt, Artificial Sequence
  SAMD9L targeting guide sequence portion
agaacacuuuuauugagguggc

SEQ ID NO: 3207 - RNA, 22 nt, Artificial Sequence
  SAMD9L targeting guide sequence portion
agaagaacacuuuuauugaggu

SEQ ID NO: 3208 - RNA, 22 nt, Artificial Sequence
  SAMD9L targeting guide sequence portion
aggauacuuugccaccucaaua

SEQ ID NO: 3209 - RNA, 22 nt, Artificial Sequence
  SAMD9L targeting guide sequence portion
aguuccaccaggauacuuugcc

SEQ ID NO: 3210 - RNA, 22 nt, Artificial Sequence
  SAMD9L targeting guide sequence portion
auacuuugccaccucaauaaaa

SEQ ID NO: 3211 - RNA, 22 nt, Artificial Sequence
  SAMD9L targeting guide sequence portion
aucaaaagaagaacacuuuuau

SEQ ID NO: 3212 - RNA, 22 nt, Artificial Sequence
  SAMD9L targeting guide sequence portion
auugagguggcaaaguauccug

SEQ ID NO: 3213 - RNA, 22 nt, Artificial Sequence
  SAMD9L targeting guide sequence portion
caaaagaagaacacuuuuauug

SEQ ID NO: 3214 - RNA, 22 nt, Artificial Sequence
  SAMD9L targeting guide sequence portion
caauaaaaguguucuucuuuug

SEQ ID NO: 3215 - RNA, 22 nt, Artificial Sequence
  SAMD9L targeting guide sequence portion
caccaggauacuuugccaccuc

SEQ ID NO: 3216 - RNA, 22 nt, Artificial Sequence
  SAMD9L targeting guide sequence portion
caccucaauaaaaguguucuuc

SEQ ID NO: 3217 - RNA, 22 nt, Artificial Sequence
  SAMD9L targeting guide sequence portion
cacuuuuauugagguggcaaag

SEQ ID NO: 3218 - RNA, 22 nt, Artificial Sequence
  SAMD9L targeting guide sequence portion
caggauacuuugccaccucaau

SEQ ID NO: 3219 - RNA, 22 nt, Artificial Sequence
  SAMD9L targeting guide sequence portion
ccaccaggauacuuugccaccu

SEQ ID NO: 3220 - RNA, 22 nt, Artificial Sequence
  SAMD9L targeting guide sequence portion
ccaccucaauaaaaguguucuu

SEQ ID NO: 3221 - RNA, 22 nt, Artificial Sequence
  SAMD9L targeting guide sequence portion
ccaggauacuuugccaccucaa

SEQ ID NO: 3222 - RNA, 22 nt, Artificial Sequence
  SAMD9L targeting guide sequence portion
ccucaauaaaaguguucuucuu

SEQ ID NO: 3223 - RNA, 22 nt, Artificial Sequence
  SAMD9L targeting guide sequence portion
cucaauaaaaguguucuucuuu

SEQ ID NO: 3224 - RNA, 22 nt, Artificial Sequence
  SAMD9L targeting guide sequence portion
cuuugccaccucaauaaaagug

SEQ ID NO: 3225 - RNA, 22 nt, Artificial Sequence
  SAMD9L targeting guide sequence portion
cuuuuauugagguggcaaagua

SEQ ID NO: 3226 - RNA, 22 nt, Artificial Sequence
  SAMD9L targeting guide sequence portion
gaaaucaaaagaagaacacuuu

SEQ ID NO: 3227 - RNA, 22 nt, Artificial Sequence
  SAMD9L targeting guide sequence portion
gaacacuuuuauugagguggca

SEQ ID NO: 3228 - RNA, 22 nt, Artificial Sequence
  SAMD9L targeting guide sequence portion
gaagaacacuuuuauugaggug

SEQ ID NO: 3229 - RNA, 22 nt, Artificial Sequence
  SAMD9L targeting guide sequence portion
gauacuuugccaccucaauaaa

SEQ ID NO: 3230 - RNA, 22 nt, Artificial Sequence
  SAMD9L targeting guide sequence portion
gccaccucaauaaaaguguucu

SEQ ID NO: 3231 - RNA, 22 nt, Artificial Sequence
  SAMD9L targeting guide sequence portion
ggauacuuugccaccucaauaa

SEQ ID NO: 3232 - RNA, 22 nt, Artificial Sequence
  SAMD9L targeting guide sequence portion
guuccaccaggauacuuugcca

SEQ ID NO: 3233 - RNA, 22 nt, Artificial Sequence
  SAMD9L targeting guide sequence portion
uacuuugccaccucaauaaaag

SEQ ID NO: 3234 - RNA, 22 nt, Artificial Sequence
  SAMD9L targeting guide sequence portion
uauugagguggcaaaguauccu

SEQ ID NO: 3235 - RNA, 22 nt, Artificial Sequence
  SAMD9L targeting guide sequence portion
ucaaaagaagaacacuuuuauu

SEQ ID NO: 3236 - RNA, 22 nt, Artificial Sequence
  SAMD9L targeting guide sequence portion
ucaauaaaaguguucuucuuuu

SEQ ID NO: 3237 - RNA, 22 nt, Artificial Sequence
  SAMD9L targeting guide sequence portion
uccaccaggauacuuugccacc

SEQ ID NO: 3238 - RNA, 22 nt, Artificial Sequence
  SAMD9L targeting guide sequence portion
ugagguggcaaaguauccuggu

SEQ ID NO: 3239 - RNA, 22 nt, Artificial Sequence
  SAMD9L targeting guide sequence portion
ugccaccucaauaaaaguguuc

SEQ ID NO: 3240 - RNA, 22 nt, Artificial Sequence
  SAMD9L targeting guide sequence portion
uuauugagguggcaaaguaucc

SEQ ID NO: 3241 - RNA, 22 nt, Artificial Sequence
  SAMD9L targeting guide sequence portion
uuccaccaggauacuuugccac

SEQ ID NO: 3242 - RNA, 22 nt, Artificial Sequence
  SAMD9L targeting guide sequence portion
uugagguggcaaaguauccugg

SEQ ID NO: 3243 - RNA, 22 nt, Artificial Sequence
  SAMD9L targeting guide sequence portion
uugccaccucaauaaaaguguu

SEQ ID NO: 3244 - RNA, 22 nt, Artificial Sequence
  SAMD9L targeting guide sequence portion
uuuauugagguggcaaaguauc

SEQ ID NO: 3245 - RNA, 22 nt, Artificial Sequence
  SAMD9L targeting guide sequence portion
uuugccaccucaauaaaagugu

SEQ ID NO: 3246 - RNA, 22 nt, Artificial Sequence
  SAMD9L targeting guide sequence portion
uuuuauugagguggcaaaguau

SEQ ID NO: 3247 - RNA, 20 nt, Artificial Sequence
  SAMD9L targeting guide sequence portion
aacugaagaagauccacggg

SEQ ID NO: 3248 - RNA, 20 nt, Artificial Sequence
  SAMD9L targeting guide sequence portion
aagaagauccacgggagggc

SEQ ID NO: 3249 - RNA, 20 nt, Artificial Sequence
  SAMD9L targeting guide sequence portion
aagaagguuuuugcccuccc

SEQ ID NO: 3250 - RNA, 20 nt, Artificial Sequence
  SAMD9L targeting guide sequence portion
aagauccacgggagggcaaa

SEQ ID NO: 3251 - RNA, 20 nt, Artificial Sequence
  SAMD9L targeting guide sequence portion
aagguuuuugcccucccgug

SEQ ID NO: 3252 - RNA, 20 nt, Artificial Sequence
  SAMD9L targeting guide sequence portion
acgggagggcaaaaaccuuc

SEQ ID NO: 3253 - RNA, 20 nt, Artificial Sequence
  SAMD9L targeting guide sequence portion
acugaagaagauccacggga

SEQ ID NO: 3254 - RNA, 20 nt, Artificial Sequence
  SAMD9L targeting guide sequence portion
agaagauccacgggagggca

SEQ ID NO: 3255 - RNA, 20 nt, Artificial Sequence
  SAMD9L targeting guide sequence portion
agaagguuuuugcccucccg

SEQ ID NO: 3256 - RNA, 20 nt, Artificial Sequence
  SAMD9L targeting guide sequence portion
agauccacgggagggcaaaa

SEQ ID NO: 3257 - RNA, 20 nt, Artificial Sequence
  SAMD9L targeting guide sequence portion
aggauaacugaagaagaucc

SEQ ID NO: 3258 - RNA, 20 nt, Artificial Sequence
  SAMD9L targeting guide sequence portion
agggcaaaaaccuucuugau

SEQ ID NO: 3259 - RNA, 20 nt, Artificial Sequence
  SAMD9L targeting guide sequence portion
agguuuuugcccucccgugg

SEQ ID NO: 3260 - RNA, 20 nt, Artificial Sequence
  SAMD9L targeting guide sequence portion
auaacugaagaagauccacg

SEQ ID NO: 3261 - RNA, 20 nt, Artificial Sequence
  SAMD9L targeting guide sequence portion
aucaagaagguuuuugcccu

SEQ ID NO: 3262 - RNA, 20 nt, Artificial Sequence
  SAMD9L targeting guide sequence portion
auccacgggagggcaaaaac

SEQ ID NO: 3263 - RNA, 20 nt, Artificial Sequence
  SAMD9L targeting guide sequence portion
caagaagguuuuugcccucc

SEQ ID NO: 3264 - RNA, 20 nt, Artificial Sequence
  SAMD9L targeting guide sequence portion
cacgggagggcaaaaaccuu

SEQ ID NO: 3265 - RNA, 20 nt, Artificial Sequence
  SAMD9L targeting guide sequence portion
caucaagaagguuuuugccc

SEQ ID NO: 3266 - RNA, 20 nt, Artificial Sequence
  SAMD9L targeting guide sequence portion
ccacgggagggcaaaaaccu

SEQ ID NO: 3267 - RNA, 20 nt, Artificial Sequence
  SAMD9L targeting guide sequence portion
cccucccguggaucuucuuc

SEQ ID NO: 3268 - RNA, 20 nt, Artificial Sequence
  SAMD9L targeting guide sequence portion
ccucccguggaucuucuuca

SEQ ID NO: 3269 - RNA, 20 nt, Artificial Sequence
  SAMD9L targeting guide sequence portion
cgggagggcaaaaaccuucu

SEQ ID NO: 3270 - RNA, 20 nt, Artificial Sequence
  SAMD9L targeting guide sequence portion
cggucaucaagaagguuuuu

SEQ ID NO: 3271 - RNA, 20 nt, Artificial Sequence
  SAMD9L targeting guide sequence portion
cucccguggaucuucuucag

SEQ ID NO: 3272 - RNA, 20 nt, Artificial Sequence
  SAMD9L targeting guide sequence portion
cugaagaagauccacgggag

SEQ ID NO: 3273 - RNA, 20 nt, Artificial Sequence
  SAMD9L targeting guide sequence portion
gaagaagauccacgggaggg

SEQ ID NO: 3274 - RNA, 20 nt, Artificial Sequence
  SAMD9L targeting guide sequence portion
gaagauccacgggagggcaa

SEQ ID NO: 3275 - RNA, 20 nt, Artificial Sequence
  SAMD9L targeting guide sequence portion
gaagguuuuugcccucccgu

SEQ ID NO: 3276 - RNA, 20 nt, Artificial Sequence
  SAMD9L targeting guide sequence portion
gagggcaaaaaccuucuuga

SEQ ID NO: 3277 - RNA, 20 nt, Artificial Sequence
  SAMD9L targeting guide sequence portion
gauaacugaagaagauccac

SEQ ID NO: 3278 - RNA, 20 nt, Artificial Sequence
  SAMD9L targeting guide sequence portion
gauccacgggagggcaaaaa

SEQ ID NO: 3279 - RNA, 20 nt, Artificial Sequence
  SAMD9L targeting guide sequence portion
gcccucccguggaucuucuu

SEQ ID NO: 3280 - RNA, 20 nt, Artificial Sequence
  SAMD9L targeting guide sequence portion
ggagggcaaaaaccuucuug

SEQ ID NO: 3281 - RNA, 20 nt, Artificial Sequence
  SAMD9L targeting guide sequence portion
ggauaacugaagaagaucca

SEQ ID NO: 3282 - RNA, 20 nt, Artificial Sequence
  SAMD9L targeting guide sequence portion
gggagggcaaaaaccuucuu

SEQ ID NO: 3283 - RNA, 20 nt, Artificial Sequence
  SAMD9L targeting guide sequence portion
ggucaucaagaagguuuuug

SEQ ID NO: 3284 - RNA, 20 nt, Artificial Sequence
  SAMD9L targeting guide sequence portion
gguuuuugcccucccgugga

SEQ ID NO: 3285 - RNA, 20 nt, Artificial Sequence
  SAMD9L targeting guide sequence portion
gucaucaagaagguuuuugc

SEQ ID NO: 3286 - RNA, 20 nt, Artificial Sequence
  SAMD9L targeting guide sequence portion
guuuuugcccucccguggau

SEQ ID NO: 3287 - RNA, 20 nt, Artificial Sequence
  SAMD9L targeting guide sequence portion
uaacugaagaagauccacgg

SEQ ID NO: 3288 - RNA, 20 nt, Artificial Sequence
  SAMD9L targeting guide sequence portion
ucaagaagguuuuugcccuc

SEQ ID NO: 3289 - RNA, 20 nt, Artificial Sequence
  SAMD9L targeting guide sequence portion
ucaucaagaagguuuuugcc

SEQ ID NO: 3290 - RNA, 20 nt, Artificial Sequence
  SAMD9L targeting guide sequence portion
uccacgggagggcaaaaacc

SEQ ID NO: 3291 - RNA, 20 nt, Artificial Sequence
  SAMD9L targeting guide sequence portion
ucccguggaucuucuucagu

SEQ ID NO: 3292 - RNA, 20 nt, Artificial Sequence
  SAMD9L targeting guide sequence portion
ucggucaucaagaagguuuu

SEQ ID NO: 3293 - RNA, 20 nt, Artificial Sequence
  SAMD9L targeting guide sequence portion
ugaagaagauccacgggagg

SEQ ID NO: 3294 - RNA, 20 nt, Artificial Sequence
  SAMD9L targeting guide sequence portion
ugcccucccguggaucuucu

SEQ ID NO: 3295 - RNA, 20 nt, Artificial Sequence
  SAMD9L targeting guide sequence portion
uugcccucccguggaucuuc

SEQ ID NO: 3296 - RNA, 20 nt, Artificial Sequence
  SAMD9L targeting guide sequence portion
uuugcccucccguggaucuu

SEQ ID NO: 3297 - RNA, 20 nt, Artificial Sequence
  SAMD9L targeting guide sequence portion
uuuugcccucccguggaucu

SEQ ID NO: 3298 - RNA, 20 nt, Artificial Sequence
  SAMD9L targeting guide sequence portion
uuuuugcccucccguggauc

SEQ ID NO: 3299 - RNA, 21 nt, Artificial Sequence
  SAMD9L targeting guide sequence portion
aacugaagaagauccacggga

SEQ ID NO: 3300 - RNA, 21 nt, Artificial Sequence
  SAMD9L targeting guide sequence portion
aagaagauccacgggagggca

SEQ ID NO: 3301 - RNA, 21 nt, Artificial Sequence
  SAMD9L targeting guide sequence portion
aagaagguuuuugcccucccg

SEQ ID NO: 3302 - RNA, 21 nt, Artificial Sequence
  SAMD9L targeting guide sequence portion
aagauccacgggagggcaaaa

SEQ ID NO: 3303 - RNA, 21 nt, Artificial Sequence
  SAMD9L targeting guide sequence portion
aagguuuuugcccucccgugg

SEQ ID NO: 3304 - RNA, 21 nt, Artificial Sequence
  SAMD9L targeting guide sequence portion
acgggagggcaaaaaccuucu

SEQ ID NO: 3305 - RNA, 21 nt, Artificial Sequence
  SAMD9L targeting guide sequence portion
acugaagaagauccacgggag

SEQ ID NO: 3306 - RNA, 21 nt, Artificial Sequence
  SAMD9L targeting guide sequence portion
agaagauccacgggagggcaa

SEQ ID NO: 3307 - RNA, 21 nt, Artificial Sequence
  SAMD9L targeting guide sequence portion
agaagguuuuugcccucccgu

SEQ ID NO: 3308 - RNA, 21 nt, Artificial Sequence
  SAMD9L targeting guide sequence portion
agauccacgggagggcaaaaa

SEQ ID NO: 3309 - RNA, 21 nt, Artificial Sequence
  SAMD9L targeting guide sequence portion
aggauaacugaagaagaucca

SEQ ID NO: 3310 - RNA, 21 nt, Artificial Sequence
  SAMD9L targeting guide sequence portion
agggcaaaaaccuucuugaug

SEQ ID NO: 3311 - RNA, 21 nt, Artificial Sequence
  SAMD9L targeting guide sequence portion
agguuuuugcccucccgugga

SEQ ID NO: 3312 - RNA, 21 nt, Artificial Sequence
  SAMD9L targeting guide sequence portion
auaacugaagaagauccacgg

SEQ ID NO: 3313 - RNA, 21 nt, Artificial Sequence
  SAMD9L targeting guide sequence portion
aucaagaagguuuuugcccuc

SEQ ID NO: 3314 - RNA, 21 nt, Artificial Sequence
  SAMD9L targeting guide sequence portion
auccacgggagggcaaaaacc

SEQ ID NO: 3315 - RNA, 21 nt, Artificial Sequence
  SAMD9L targeting guide sequence portion
caagaagguuuuugcccuccc

SEQ ID NO: 3316 - RNA, 21 nt, Artificial Sequence
  SAMD9L targeting guide sequence portion
cacgggagggcaaaaaccuuc

SEQ ID NO: 3317 - RNA, 21 nt, Artificial Sequence
  SAMD9L targeting guide sequence portion
caucaagaagguuuuugcccu

SEQ ID NO: 3318 - RNA, 21 nt, Artificial Sequence
  SAMD9L targeting guide sequence portion
ccacgggagggcaaaaaccuu

SEQ ID NO: 3319 - RNA, 21 nt, Artificial Sequence
  SAMD9L targeting guide sequence portion
cccucccguggaucuucuuca

SEQ ID NO: 3320 - RNA, 21 nt, Artificial Sequence
  SAMD9L targeting guide sequence portion
ccucccguggaucuucuucag

SEQ ID NO: 3321 - RNA, 21 nt, Artificial Sequence
  SAMD9L targeting guide sequence portion
cgggagggcaaaaaccuucuu

SEQ ID NO: 3322 - RNA, 21 nt, Artificial Sequence
  SAMD9L targeting guide sequence portion
cggucaucaagaagguuuuug

SEQ ID NO: 3323 - RNA, 21 nt, Artificial Sequence
  SAMD9L targeting guide sequence portion
cucccguggaucuucuucagu

SEQ ID NO: 3324 - RNA, 21 nt, Artificial Sequence
  SAMD9L targeting guide sequence portion
cucggucaucaagaagguuuu

SEQ ID NO: 3325 - RNA, 21 nt, Artificial Sequence
  SAMD9L targeting guide sequence portion
cugaagaagauccacgggagg

SEQ ID NO: 3326 - RNA, 21 nt, Artificial Sequence
  SAMD9L targeting guide sequence portion
gaagaagauccacgggagggc

SEQ ID NO: 3327 - RNA, 21 nt, Artificial Sequence
  SAMD9L targeting guide sequence portion
gaagauccacgggagggcaaa

SEQ ID NO: 3328 - RNA, 21 nt, Artificial Sequence
  SAMD9L targeting guide sequence portion
gaagguuuuugcccucccgug

SEQ ID NO: 3329 - RNA, 21 nt, Artificial Sequence
  SAMD9L targeting guide sequence portion
gagggcaaaaaccuucuugau

SEQ ID NO: 3330 - RNA, 21 nt, Artificial Sequence
  SAMD9L targeting guide sequence portion
gauaacugaagaagauccacg

SEQ ID NO: 3331 - RNA, 21 nt, Artificial Sequence
  SAMD9L targeting guide sequence portion
gauccacgggagggcaaaaac

SEQ ID NO: 3332 - RNA, 21 nt, Artificial Sequence
  SAMD9L targeting guide sequence portion
gcccucccguggaucuucuuc

SEQ ID NO: 3333 - RNA, 21 nt, Artificial Sequence
  SAMD9L targeting guide sequence portion
ggagggcaaaaaccuucuuga

SEQ ID NO: 3334 - RNA, 21 nt, Artificial Sequence
  SAMD9L targeting guide sequence portion
ggauaacugaagaagauccac

SEQ ID NO: 3335 - RNA, 21 nt, Artificial Sequence
  SAMD9L targeting guide sequence portion
gggagggcaaaaaccuucuug

SEQ ID NO: 3336 - RNA, 21 nt, Artificial Sequence
  SAMD9L targeting guide sequence portion
ggucaucaagaagguuuuugc

SEQ ID NO: 3337 - RNA, 21 nt, Artificial Sequence
  SAMD9L targeting guide sequence portion
gguuuuugcccucccguggau

SEQ ID NO: 3338 - RNA, 21 nt, Artificial Sequence
  SAMD9L targeting guide sequence portion
gucaucaagaagguuuuugcc

SEQ ID NO: 3339 - RNA, 21 nt, Artificial Sequence
  SAMD9L targeting guide sequence portion
guuuuugcccucccguggauc

SEQ ID NO: 3340 - RNA, 21 nt, Artificial Sequence
  SAMD9L targeting guide sequence portion
uaacugaagaagauccacggg

SEQ ID NO: 3341 - RNA, 21 nt, Artificial Sequence
  SAMD9L targeting guide sequence portion
uaggauaacugaagaagaucc

SEQ ID NO: 3342 - RNA, 21 nt, Artificial Sequence
  SAMD9L targeting guide sequence portion
ucaagaagguuuuugcccucc

SEQ ID NO: 3343 - RNA, 21 nt, Artificial Sequence
  SAMD9L targeting guide sequence portion
ucaucaagaagguuuuugccc

SEQ ID NO: 3344 - RNA, 21 nt, Artificial Sequence
  SAMD9L targeting guide sequence portion
uccacgggagggcaaaaaccu

SEQ ID NO: 3345 - RNA, 21 nt, Artificial Sequence
  SAMD9L targeting guide sequence portion
ucccguggaucuucuucaguu

SEQ ID NO: 3346 - RNA, 21 nt, Artificial Sequence
  SAMD9L targeting guide sequence portion
ucggucaucaagaagguuuuu

SEQ ID NO: 3347 - RNA, 21 nt, Artificial Sequence
  SAMD9L targeting guide sequence portion
ugaagaagauccacgggaggg

SEQ ID NO: 3348 - RNA, 21 nt, Artificial Sequence
  SAMD9L targeting guide sequence portion
ugcccucccguggaucuucuu

SEQ ID NO: 3349 - RNA, 21 nt, Artificial Sequence
  SAMD9L targeting guide sequence portion
uugcccucccguggaucuucu

SEQ ID NO: 3350 - RNA, 21 nt, Artificial Sequence
  SAMD9L targeting guide sequence portion
uuugcccucccguggaucuuc

SEQ ID NO: 3351 - RNA, 21 nt, Artificial Sequence
  SAMD9L targeting guide sequence portion
uuuugcccucccguggaucuu

SEQ ID NO: 3352 - RNA, 21 nt, Artificial Sequence
  SAMD9L targeting guide sequence portion
uuuuugcccucccguggaucu

SEQ ID NO: 3353 - RNA, 22 nt, Artificial Sequence
  SAMD9L targeting guide sequence portion
aacugaagaagauccacgggag

SEQ ID NO: 3354 - RNA, 22 nt, Artificial Sequence
  SAMD9L targeting guide sequence portion
aagaagauccacgggagggcaa

SEQ ID NO: 3355 - RNA, 22 nt, Artificial Sequence
  SAMD9L targeting guide sequence portion
aagaagguuuuugcccucccgu

SEQ ID NO: 3356 - RNA, 22 nt, Artificial Sequence
  SAMD9L targeting guide sequence portion
aagauccacgggagggcaaaaa

SEQ ID NO: 3357 - RNA, 22 nt, Artificial Sequence
  SAMD9L targeting guide sequence portion
aagguuuuugcccucccgugga

SEQ ID NO: 3358 - RNA, 22 nt, Artificial Sequence
  SAMD9L targeting guide sequence portion
acgggagggcaaaaaccuucuu

SEQ ID NO: 3359 - RNA, 22 nt, Artificial Sequence
  SAMD9L targeting guide sequence portion
acucggucaucaagaagguuuu

SEQ ID NO: 3360 - RNA, 22 nt, Artificial Sequence
  SAMD9L targeting guide sequence portion
acugaagaagauccacgggagg

SEQ ID NO: 3361 - RNA, 22 nt, Artificial Sequence
  SAMD9L targeting guide sequence portion
agaagauccacgggagggcaaa

SEQ ID NO: 3362 - RNA, 22 nt, Artificial Sequence
  SAMD9L targeting guide sequence portion
agaagguuuuugcccucccgug

SEQ ID NO: 3363 - RNA, 22 nt, Artificial Sequence
  SAMD9L targeting guide sequence portion
agauccacgggagggcaaaaac

SEQ ID NO: 3364 - RNA, 22 nt, Artificial Sequence
  SAMD9L targeting guide sequence portion
aggauaacugaagaagauccac

SEQ ID NO: 3365 - RNA, 22 nt, Artificial Sequence
  SAMD9L targeting guide sequence portion
agggcaaaaaccuucuugauga

SEQ ID NO: 3366 - RNA, 22 nt, Artificial Sequence
  SAMD9L targeting guide sequence portion
agguuuuugcccucccguggau

SEQ ID NO: 3367 - RNA, 22 nt, Artificial Sequence
  SAMD9L targeting guide sequence portion
auaacugaagaagauccacggg

SEQ ID NO: 3368 - RNA, 22 nt, Artificial Sequence
  SAMD9L targeting guide sequence portion
aucaagaagguuuuugcccucc

SEQ ID NO: 3369 - RNA, 22 nt, Artificial Sequence
  SAMD9L targeting guide sequence portion
auccacgggagggcaaaaaccu

SEQ ID NO: 3370 - RNA, 22 nt, Artificial Sequence
  SAMD9L targeting guide sequence portion
caagaagguuuuugcccucccg

SEQ ID NO: 3371 - RNA, 22 nt, Artificial Sequence
  SAMD9L targeting guide sequence portion
cacgggagggcaaaaaccuucu

SEQ ID NO: 3372 - RNA, 22 nt, Artificial Sequence
  SAMD9L targeting guide sequence portion
caucaagaagguuuuugcccuc

SEQ ID NO: 3373 - RNA, 22 nt, Artificial Sequence
  SAMD9L targeting guide sequence portion
ccacgggagggcaaaaaccuuc

SEQ ID NO: 3374 - RNA, 22 nt, Artificial Sequence
  SAMD9L targeting guide sequence portion
cccucccguggaucuucuucag

SEQ ID NO: 3375 - RNA, 22 nt, Artificial Sequence
  SAMD9L targeting guide sequence portion
ccucccguggaucuucuucagu

SEQ ID NO: 3376 - RNA, 22 nt, Artificial Sequence
  SAMD9L targeting guide sequence portion
cgggagggcaaaaaccuucuug

SEQ ID NO: 3377 - RNA, 22 nt, Artificial Sequence
  SAMD9L targeting guide sequence portion
cggucaucaagaagguuuuugc

SEQ ID NO: 3378 - RNA, 22 nt, Artificial Sequence
  SAMD9L targeting guide sequence portion
cuaggauaacugaagaagaucc

SEQ ID NO: 3379 - RNA, 22 nt, Artificial Sequence
  SAMD9L targeting guide sequence portion
cucccguggaucuucuucaguu

SEQ ID NO: 3380 - RNA, 22 nt, Artificial Sequence
  SAMD9L targeting guide sequence portion
cucggucaucaagaagguuuuu

SEQ ID NO: 3381 - RNA, 22 nt, Artificial Sequence
  SAMD9L targeting guide sequence portion
cugaagaagauccacgggaggg

SEQ ID NO: 3382 - RNA, 22 nt, Artificial Sequence
  SAMD9L targeting guide sequence portion
gaagaagauccacgggagggca

SEQ ID NO: 3383 - RNA, 22 nt, Artificial Sequence
  SAMD9L targeting guide sequence portion
gaagauccacgggagggcaaaa

SEQ ID NO: 3384 - RNA, 22 nt, Artificial Sequence
  SAMD9L targeting guide sequence portion
gaagguuuuugcccucccgugg

SEQ ID NO: 3385 - RNA, 22 nt, Artificial Sequence
  SAMD9L targeting guide sequence portion
gagggcaaaaaccuucuugaug

SEQ ID NO: 3386 - RNA, 22 nt, Artificial Sequence
  SAMD9L targeting guide sequence portion
gauaacugaagaagauccacgg

SEQ ID NO: 3387 - RNA, 22 nt, Artificial Sequence
  SAMD9L targeting guide sequence portion
gauccacgggagggcaaaaacc

SEQ ID NO: 3388 - RNA, 22 nt, Artificial Sequence
  SAMD9L targeting guide sequence portion
gcccucccguggaucuucuuca

SEQ ID NO: 3389 - RNA, 22 nt, Artificial Sequence
  SAMD9L targeting guide sequence portion
ggagggcaaaaaccuucuugau

SEQ ID NO: 3390 - RNA, 22 nt, Artificial Sequence
  SAMD9L targeting guide sequence portion
ggauaacugaagaagauccacg

SEQ ID NO: 3391 - RNA, 22 nt, Artificial Sequence
  SAMD9L targeting guide sequence portion
gggagggcaaaaaccuucuuga

SEQ ID NO: 3392 - RNA, 22 nt, Artificial Sequence
  SAMD9L targeting guide sequence portion
ggucaucaagaagguuuuugcc

SEQ ID NO: 3393 - RNA, 22 nt, Artificial Sequence
  SAMD9L targeting guide sequence portion
gguuuuugcccucccguggauc

SEQ ID NO: 3394 - RNA, 22 nt, Artificial Sequence
  SAMD9L targeting guide sequence portion
gucaucaagaagguuuuugccc

SEQ ID NO: 3395 - RNA, 22 nt, Artificial Sequence
  SAMD9L targeting guide sequence portion
guuuuugcccucccguggaucu

SEQ ID NO: 3396 - RNA, 22 nt, Artificial Sequence
  SAMD9L targeting guide sequence portion
uaacugaagaagauccacggga

SEQ ID NO: 3397 - RNA, 22 nt, Artificial Sequence
  SAMD9L targeting guide sequence portion
uaggauaacugaagaagaucca

SEQ ID NO: 3398 - RNA, 22 nt, Artificial Sequence
  SAMD9L targeting guide sequence portion
ucaagaagguuuuugcccuccc

SEQ ID NO: 3399 - RNA, 22 nt, Artificial Sequence
  SAMD9L targeting guide sequence portion
ucaucaagaagguuuuugcccu

SEQ ID NO: 3400 - RNA, 22 nt, Artificial Sequence
  SAMD9L targeting guide sequence portion
uccacgggagggcaaaaaccuu

SEQ ID NO: 3401 - RNA, 22 nt, Artificial Sequence
  SAMD9L targeting guide sequence portion
ucccguggaucuucuucaguua

SEQ ID NO: 3402 - RNA, 22 nt, Artificial Sequence
  SAMD9L targeting guide sequence portion
ucggucaucaagaagguuuuug

SEQ ID NO: 3403 - RNA, 22 nt, Artificial Sequence
  SAMD9L targeting guide sequence portion
ugaagaagauccacgggagggc

SEQ ID NO: 3404 - RNA, 22 nt, Artificial Sequence
  SAMD9L targeting guide sequence portion
ugcccucccguggaucuucuuc

SEQ ID NO: 3405 - RNA, 22 nt, Artificial Sequence
  SAMD9L targeting guide sequence portion
uugcccucccguggaucuucuu

SEQ ID NO: 3406 - RNA, 22 nt, Artificial Sequence
  SAMD9L targeting guide sequence portion
uuugcccucccguggaucuucu

SEQ ID NO: 3407 - RNA, 22 nt, Artificial Sequence
  SAMD9L targeting guide sequence portion
uuuugcccucccguggaucuuc

SEQ ID NO: 3408 - RNA, 22 nt, Artificial Sequence
  SAMD9L targeting guide sequence portion
uuuuugcccucccguggaucuu

SEQ ID NO: 3409 - RNA, 20 nt, Artificial Sequence
  SAMD9L targeting guide sequence portion
aagaagauccacgggugggc

SEQ ID NO: 3410 - RNA, 20 nt, Artificial Sequence
  SAMD9L targeting guide sequence portion
aagaagguuuuugcccaccc

SEQ ID NO: 3411 - RNA, 20 nt, Artificial Sequence
  SAMD9L targeting guide sequence portion
aagauccacgggugggcaaa

SEQ ID NO: 3412 - RNA, 20 nt, Artificial Sequence
  SAMD9L targeting guide sequence portion
aagguuuuugcccacccgug

SEQ ID NO: 3413 - RNA, 20 nt, Artificial Sequence
  SAMD9L targeting guide sequence portion
acccguggaucuucuucagu

SEQ ID NO: 3414 - RNA, 20 nt, Artificial Sequence
  SAMD9L targeting guide sequence portion
acgggugggcaaaaaccuuc

SEQ ID NO: 3415 - RNA, 20 nt, Artificial Sequence
  SAMD9L targeting guide sequence portion
acugaagaagauccacgggu

SEQ ID NO: 3416 - RNA, 20 nt, Artificial Sequence
  SAMD9L targeting guide sequence portion
agaagauccacgggugggca

SEQ ID NO: 3417 - RNA, 20 nt, Artificial Sequence
  SAMD9L targeting guide sequence portion
agaagguuuuugcccacccg

SEQ ID NO: 3418 - RNA, 20 nt, Artificial Sequence
  SAMD9L targeting guide sequence portion
agauccacgggugggcaaaa

SEQ ID NO: 3419 - RNA, 20 nt, Artificial Sequence
  SAMD9L targeting guide sequence portion
agguuuuugcccacccgugg

SEQ ID NO: 3420 - RNA, 20 nt, Artificial Sequence
  SAMD9L targeting guide sequence portion
aucaagaagguuuuugccca

SEQ ID NO: 3421 - RNA, 20 nt, Artificial Sequence
  SAMD9L targeting guide sequence portion
auccacgggugggcaaaaac

SEQ ID NO: 3422 - RNA, 20 nt, Artificial Sequence
  SAMD9L targeting guide sequence portion
caagaagguuuuugcccacc

SEQ ID NO: 3423 - RNA, 20 nt, Artificial Sequence
  SAMD9L targeting guide sequence portion
cacccguggaucuucuucag

SEQ ID NO: 3424 - RNA, 20 nt, Artificial Sequence
  SAMD9L targeting guide sequence portion
cacgggugggcaaaaaccuu

SEQ ID NO: 3425 - RNA, 20 nt, Artificial Sequence
  SAMD9L targeting guide sequence portion
ccacccguggaucuucuuca

SEQ ID NO: 3426 - RNA, 20 nt, Artificial Sequence
  SAMD9L targeting guide sequence portion
ccacgggugggcaaaaaccu

SEQ ID NO: 3427 - RNA, 20 nt, Artificial Sequence
  SAMD9L targeting guide sequence portion
cccacccguggaucuucuuc

SEQ ID NO: 3428 - RNA, 20 nt, Artificial Sequence
  SAMD9L targeting guide sequence portion
cgggugggcaaaaaccuucu

SEQ ID NO: 3429 - RNA, 20 nt, Artificial Sequence
  SAMD9L targeting guide sequence portion
cugaagaagauccacgggug

SEQ ID NO: 3430 - RNA, 20 nt, Artificial Sequence
  SAMD9L targeting guide sequence portion
gaagaagauccacggguggg

SEQ ID NO: 3431 - RNA, 20 nt, Artificial Sequence
  SAMD9L targeting guide sequence portion
gaagauccacgggugggcaa

SEQ ID NO: 3432 - RNA, 20 nt, Artificial Sequence
  SAMD9L targeting guide sequence portion
gaagguuuuugcccacccgu

SEQ ID NO: 3433 - RNA, 20 nt, Artificial Sequence
  SAMD9L targeting guide sequence portion
gauccacgggugggcaaaaa

SEQ ID NO: 3434 - RNA, 20 nt, Artificial Sequence
  SAMD9L targeting guide sequence portion
gcccacccguggaucuucuu

SEQ ID NO: 3435 - RNA, 20 nt, Artificial Sequence
  SAMD9L targeting guide sequence portion
gggugggcaaaaaccuucuu

SEQ ID NO: 3436 - RNA, 20 nt, Artificial Sequence
  SAMD9L targeting guide sequence portion
ggugggcaaaaaccuucuug

SEQ ID NO: 3437 - RNA, 20 nt, Artificial Sequence
  SAMD9L targeting guide sequence portion
gguuuuugcccacccgugga

SEQ ID NO: 3438 - RNA, 20 nt, Artificial Sequence
  SAMD9L targeting guide sequence portion
gugggcaaaaaccuucuuga

SEQ ID NO: 3439 - RNA, 20 nt, Artificial Sequence
  SAMD9L targeting guide sequence portion
guuuuugcccacccguggau

SEQ ID NO: 3440 - RNA, 20 nt, Artificial Sequence
  SAMD9L targeting guide sequence portion
ucaagaagguuuuugcccac

SEQ ID NO: 3441 - RNA, 20 nt, Artificial Sequence
  SAMD9L targeting guide sequence portion
uccacgggugggcaaaaacc

SEQ ID NO: 3442 - RNA, 20 nt, Artificial Sequence
  SAMD9L targeting guide sequence portion
ugaagaagauccacgggugg

SEQ ID NO: 3443 - RNA, 20 nt, Artificial Sequence
  SAMD9L targeting guide sequence portion
ugcccacccguggaucuucu

SEQ ID NO: 3444 - RNA, 20 nt, Artificial Sequence
  SAMD9L targeting guide sequence portion
ugggcaaaaaccuucuugau

SEQ ID NO: 3445 - RNA, 20 nt, Artificial Sequence
  SAMD9L targeting guide sequence portion
uugcccacccguggaucuuc

SEQ ID NO: 3446 - RNA, 20 nt, Artificial Sequence
  SAMD9L targeting guide sequence portion
uuugcccacccguggaucuu

SEQ ID NO: 3447 - RNA, 20 nt, Artificial Sequence
  SAMD9L targeting guide sequence portion
uuuugcccacccguggaucu

SEQ ID NO: 3448 - RNA, 20 nt, Artificial Sequence
  SAMD9L targeting guide sequence portion
uuuuugcccacccguggauc

SEQ ID NO: 3449 - RNA, 21 nt, Artificial Sequence
  SAMD9L targeting guide sequence portion
aacugaagaagauccacgggu

SEQ ID NO: 3450 - RNA, 21 nt, Artificial Sequence
  SAMD9L targeting guide sequence portion
aagaagauccacgggugggca

SEQ ID NO: 3451 - RNA, 21 nt, Artificial Sequence
  SAMD9L targeting guide sequence portion
aagaagguuuuugcccacccg

SEQ ID NO: 3452 - RNA, 21 nt, Artificial Sequence
  SAMD9L targeting guide sequence portion
aagauccacgggugggcaaaa

SEQ ID NO: 3453 - RNA, 21 nt, Artificial Sequence
  SAMD9L targeting guide sequence portion
aagguuuuugcccacccgugg

SEQ ID NO: 3454 - RNA, 21 nt, Artificial Sequence
  SAMD9L targeting guide sequence portion
acccguggaucuucuucaguu

SEQ ID NO: 3455 - RNA, 21 nt, Artificial Sequence
  SAMD9L targeting guide sequence portion
acgggugggcaaaaaccuucu

SEQ ID NO: 3456 - RNA, 21 nt, Artificial Sequence
  SAMD9L targeting guide sequence portion
acugaagaagauccacgggug

SEQ ID NO: 3457 - RNA, 21 nt, Artificial Sequence
  SAMD9L targeting guide sequence portion
agaagauccacgggugggcaa

SEQ ID NO: 3458 - RNA, 21 nt, Artificial Sequence
  SAMD9L targeting guide sequence portion
agaagguuuuugcccacccgu

SEQ ID NO: 3459 - RNA, 21 nt, Artificial Sequence
  SAMD9L targeting guide sequence portion
agauccacgggugggcaaaaa

SEQ ID NO: 3460 - RNA, 21 nt, Artificial Sequence
  SAMD9L targeting guide sequence portion
agguuuuugcccacccgugga

SEQ ID NO: 3461 - RNA, 21 nt, Artificial Sequence
  SAMD9L targeting guide sequence portion
aucaagaagguuuuugcccac

SEQ ID NO: 3462 - RNA, 21 nt, Artificial Sequence
  SAMD9L targeting guide sequence portion
auccacgggugggcaaaaacc

SEQ ID NO: 3463 - RNA, 21 nt, Artificial Sequence
  SAMD9L targeting guide sequence portion
caagaagguuuuugcccaccc

SEQ ID NO: 3464 - RNA, 21 nt, Artificial Sequence
  SAMD9L targeting guide sequence portion
cacccguggaucuucuucagu

SEQ ID NO: 3465 - RNA, 21 nt, Artificial Sequence
  SAMD9L targeting guide sequence portion
cacgggugggcaaaaaccuuc

SEQ ID NO: 3466 - RNA, 21 nt, Artificial Sequence
  SAMD9L targeting guide sequence portion
caucaagaagguuuuugccca

SEQ ID NO: 3467 - RNA, 21 nt, Artificial Sequence
  SAMD9L targeting guide sequence portion
ccacccguggaucuucuucag

SEQ ID NO: 3468 - RNA, 21 nt, Artificial Sequence
  SAMD9L targeting guide sequence portion
ccacgggugggcaaaaaccuu

SEQ ID NO: 3469 - RNA, 21 nt, Artificial Sequence
  SAMD9L targeting guide sequence portion
cccacccguggaucuucuuca

SEQ ID NO: 3470 - RNA, 21 nt, Artificial Sequence
  SAMD9L targeting guide sequence portion
cgggugggcaaaaaccuucuu

SEQ ID NO: 3471 - RNA, 21 nt, Artificial Sequence
  SAMD9L targeting guide sequence portion
cugaagaagauccacgggugg

SEQ ID NO: 3472 - RNA, 21 nt, Artificial Sequence
  SAMD9L targeting guide sequence portion
gaagaagauccacgggugggc

SEQ ID NO: 3473 - RNA, 21 nt, Artificial Sequence
  SAMD9L targeting guide sequence portion
gaagauccacgggugggcaaa

SEQ ID NO: 3474 - RNA, 21 nt, Artificial Sequence
  SAMD9L targeting guide sequence portion
gaagguuuuugcccacccgug

SEQ ID NO: 3475 - RNA, 21 nt, Artificial Sequence
  SAMD9L targeting guide sequence portion
gauccacgggugggcaaaaac

SEQ ID NO: 3476 - RNA, 21 nt, Artificial Sequence
  SAMD9L targeting guide sequence portion
gcccacccguggaucuucuuc

SEQ ID NO: 3477 - RNA, 21 nt, Artificial Sequence
  SAMD9L targeting guide sequence portion
gggugggcaaaaaccuucuug

SEQ ID NO: 3478 - RNA, 21 nt, Artificial Sequence
  SAMD9L targeting guide sequence portion
ggugggcaaaaaccuucuuga

SEQ ID NO: 3479 - RNA, 21 nt, Artificial Sequence
  SAMD9L targeting guide sequence portion
gguuuuugcccacccguggau

SEQ ID NO: 3480 - RNA, 21 nt, Artificial Sequence
  SAMD9L targeting guide sequence portion
gugggcaaaaaccuucuugau

SEQ ID NO: 3481 - RNA, 21 nt, Artificial Sequence
  SAMD9L targeting guide sequence portion
guuuuugcccacccguggauc

SEQ ID NO: 3482 - RNA, 21 nt, Artificial Sequence
  SAMD9L targeting guide sequence portion
ucaagaagguuuuugcccacc

SEQ ID NO: 3483 - RNA, 21 nt, Artificial Sequence
  SAMD9L targeting guide sequence portion
uccacgggugggcaaaaaccu

SEQ ID NO: 3484 - RNA, 21 nt, Artificial Sequence
  SAMD9L targeting guide sequence portion
ugaagaagauccacggguggg

SEQ ID NO: 3485 - RNA, 21 nt, Artificial Sequence
  SAMD9L targeting guide sequence portion
ugcccacccguggaucuucuu

SEQ ID NO: 3486 - RNA, 21 nt, Artificial Sequence
  SAMD9L targeting guide sequence portion
ugggcaaaaaccuucuugaug

SEQ ID NO: 3487 - RNA, 21 nt, Artificial Sequence
  SAMD9L targeting guide sequence portion
uugcccacccguggaucuucu

SEQ ID NO: 3488 - RNA, 21 nt, Artificial Sequence
  SAMD9L targeting guide sequence portion
uuugcccacccguggaucuuc

SEQ ID NO: 3489 - RNA, 21 nt, Artificial Sequence
  SAMD9L targeting guide sequence portion
uuuugcccacccguggaucuu

SEQ ID NO: 3490 - RNA, 21 nt, Artificial Sequence
  SAMD9L targeting guide sequence portion
uuuuugcccacccguggaucu

SEQ ID NO: 3491 - RNA, 22 nt, Artificial Sequence
  SAMD9L targeting guide sequence portion
aacugaagaagauccacgggug

SEQ ID NO: 3492 - RNA, 22 nt, Artificial Sequence
  SAMD9L targeting guide sequence portion
aagaagauccacgggugggcaa

SEQ ID NO: 3493 - RNA, 22 nt, Artificial Sequence
  SAMD9L targeting guide sequence portion
aagaagguuuuugcccacccgu

SEQ ID NO: 3494 - RNA, 22 nt, Artificial Sequence
  SAMD9L targeting guide sequence portion
aagauccacgggugggcaaaaa

SEQ ID NO: 3495 - RNA, 22 nt, Artificial Sequence
  SAMD9L targeting guide sequence portion
aagguuuuugcccacccgugga

SEQ ID NO: 3496 - RNA, 22 nt, Artificial Sequence
  SAMD9L targeting guide sequence portion
acccguggaucuucuucaguua

SEQ ID NO: 3497 - RNA, 22 nt, Artificial Sequence
  SAMD9L targeting guide sequence portion
acgggugggcaaaaaccuucuu

SEQ ID NO: 3498 - RNA, 22 nt, Artificial Sequence
  SAMD9L targeting guide sequence portion
acugaagaagauccacgggugg

SEQ ID NO: 3499 - RNA, 22 nt, Artificial Sequence
  SAMD9L targeting guide sequence portion
agaagauccacgggugggcaaa

SEQ ID NO: 3500 - RNA, 22 nt, Artificial Sequence
  SAMD9L targeting guide sequence portion
agaagguuuuugcccacccgug

SEQ ID NO: 3501 - RNA, 22 nt, Artificial Sequence
  SAMD9L targeting guide sequence portion
agauccacgggugggcaaaaac

SEQ ID NO: 3502 - RNA, 22 nt, Artificial Sequence
  SAMD9L targeting guide sequence portion
agguuuuugcccacccguggau

SEQ ID NO: 3503 - RNA, 22 nt, Artificial Sequence
  SAMD9L targeting guide sequence portion
aucaagaagguuuuugcccacc

SEQ ID NO: 3504 - RNA, 22 nt, Artificial Sequence
  SAMD9L targeting guide sequence portion
auccacgggugggcaaaaaccu

SEQ ID NO: 3505 - RNA, 22 nt, Artificial Sequence
  SAMD9L targeting guide sequence portion
caagaagguuuuugcccacccg

SEQ ID NO: 3506 - RNA, 22 nt, Artificial Sequence
  SAMD9L targeting guide sequence portion
cacccguggaucuucuucaguu

SEQ ID NO: 3507 - RNA, 22 nt, Artificial Sequence
  SAMD9L targeting guide sequence portion
cacgggugggcaaaaaccuucu

SEQ ID NO: 3508 - RNA, 22 nt, Artificial Sequence
  SAMD9L targeting guide sequence portion
caucaagaagguuuuugcccac

SEQ ID NO: 3509 - RNA, 22 nt, Artificial Sequence
  SAMD9L targeting guide sequence portion
ccacccguggaucuucuucagu

SEQ ID NO: 3510 - RNA, 22 nt, Artificial Sequence
  SAMD9L targeting guide sequence portion
ccacgggugggcaaaaaccuuc

SEQ ID NO: 3511 - RNA, 22 nt, Artificial Sequence
  SAMD9L targeting guide sequence portion
cccacccguggaucuucuucag

SEQ ID NO: 3512 - RNA, 22 nt, Artificial Sequence
  SAMD9L targeting guide sequence portion
cgggugggcaaaaaccuucuug

SEQ ID NO: 3513 - RNA, 22 nt, Artificial Sequence
  SAMD9L targeting guide sequence portion
cugaagaagauccacggguggg

SEQ ID NO: 3514 - RNA, 22 nt, Artificial Sequence
  SAMD9L targeting guide sequence portion
gaagaagauccacgggugggca

SEQ ID NO: 3515 - RNA, 22 nt, Artificial Sequence
  SAMD9L targeting guide sequence portion
gaagauccacgggugggcaaaa

SEQ ID NO: 3516 - RNA, 22 nt, Artificial Sequence
  SAMD9L targeting guide sequence portion
gaagguuuuugcccacccgugg

SEQ ID NO: 3517 - RNA, 22 nt, Artificial Sequence
  SAMD9L targeting guide sequence portion
gauccacgggugggcaaaaacc

SEQ ID NO: 3518 - RNA, 22 nt, Artificial Sequence
  SAMD9L targeting guide sequence portion
gcccacccguggaucuucuuca

SEQ ID NO: 3519 - RNA, 22 nt, Artificial Sequence
  SAMD9L targeting guide sequence portion
gggugggcaaaaaccuucuuga

SEQ ID NO: 3520 - RNA, 22 nt, Artificial Sequence
  SAMD9L targeting guide sequence portion
ggugggcaaaaaccuucuugau

SEQ ID NO: 3521 - RNA, 22 nt, Artificial Sequence
  SAMD9L targeting guide sequence portion
gguuuuugcccacccguggauc

SEQ ID NO: 3522 - RNA, 22 nt, Artificial Sequence
  SAMD9L targeting guide sequence portion
gugggcaaaaaccuucuugaug

SEQ ID NO: 3523 - RNA, 22 nt, Artificial Sequence
  SAMD9L targeting guide sequence portion
guuuuugcccacccguggaucu

SEQ ID NO: 3524 - RNA, 22 nt, Artificial Sequence
  SAMD9L targeting guide sequence portion
uaacugaagaagauccacgggu

SEQ ID NO: 3525 - RNA, 22 nt, Artificial Sequence
  SAMD9L targeting guide sequence portion
ucaagaagguuuuugcccaccc

SEQ ID NO: 3526 - RNA, 22 nt, Artificial Sequence
  SAMD9L targeting guide sequence portion
ucaucaagaagguuuuugccca

SEQ ID NO: 3527 - RNA, 22 nt, Artificial Sequence
  SAMD9L targeting guide sequence portion
uccacgggugggcaaaaaccuu

SEQ ID NO: 3528 - RNA, 22 nt, Artificial Sequence
  SAMD9L targeting guide sequence portion
ugaagaagauccacgggugggc

SEQ ID NO: 3529 - RNA, 22 nt, Artificial Sequence
  SAMD9L targeting guide sequence portion
ugcccacccguggaucuucuuc

SEQ ID NO: 3530 - RNA, 22 nt, Artificial Sequence
  SAMD9L targeting guide sequence portion
ugggcaaaaaccuucuugauga

SEQ ID NO: 3531 - RNA, 22 nt, Artificial Sequence
  SAMD9L targeting guide sequence portion
uugcccacccguggaucuucuu

SEQ ID NO: 3532 - RNA, 22 nt, Artificial Sequence
  SAMD9L targeting guide sequence portion
uuugcccacccguggaucuucu

SEQ ID NO: 3533 - RNA, 22 nt, Artificial Sequence
  SAMD9L targeting guide sequence portion
uuuugcccacccguggaucuuc

SEQ ID NO: 3534 - RNA, 22 nt, Artificial Sequence
  SAMD9L targeting guide sequence portion
uuuuugcccacccguggaucuu

SEQ ID NO: 3535 - RNA, 20 nt, Artificial Sequence
  SAMD9L targeting guide sequence portion
aaaauuggugacucggucau

SEQ ID NO: 3536 - RNA, 20 nt, Artificial Sequence
  SAMD9L targeting guide sequence portion
aaaccuucuugaugaccgag

SEQ ID NO: 3537 - RNA, 20 nt, Artificial Sequence
  SAMD9L targeting guide sequence portion
aaacuaaaauuggugacucg

SEQ ID NO: 3538 - RNA, 20 nt, Artificial Sequence
  SAMD9L targeting guide sequence portion
aaauuggugacucggucauc

SEQ ID NO: 3539 - RNA, 20 nt, Artificial Sequence
  SAMD9L targeting guide sequence portion
aacagcacuauccuuaaacu

SEQ ID NO: 3540 - RNA, 20 nt, Artificial Sequence
  SAMD9L targeting guide sequence portion
aaccuucuugaugaccgagu

SEQ ID NO: 3541 - RNA, 20 nt, Artificial Sequence
  SAMD9L targeting guide sequence portion
aacuaaaauuggugacucgg

SEQ ID NO: 3542 - RNA, 20 nt, Artificial Sequence
  SAMD9L targeting guide sequence portion
aauuggugacucggucauca

SEQ ID NO: 3543 - RNA, 20 nt, Artificial Sequence
  SAMD9L targeting guide sequence portion
aauuuuaguuuaaggauagu

SEQ ID NO: 3544 - RNA, 20 nt, Artificial Sequence
  SAMD9L targeting guide sequence portion
acagcacuauccuuaaacua

SEQ ID NO: 3545 - RNA, 20 nt, Artificial Sequence
  SAMD9L targeting guide sequence portion
accaauuuuaguuuaaggau

SEQ ID NO: 3546 - RNA, 20 nt, Artificial Sequence
  SAMD9L targeting guide sequence portion
accgagucaccaauuuuagu

SEQ ID NO: 3547 - RNA, 20 nt, Artificial Sequence
  SAMD9L targeting guide sequence portion
accuucuugaugaccgaguc

SEQ ID NO: 3548 - RNA, 20 nt, Artificial Sequence
  SAMD9L targeting guide sequence portion
acuaaaauuggugacucggu

SEQ ID NO: 3549 - RNA, 20 nt, Artificial Sequence
  SAMD9L targeting guide sequence portion
acuauccuuaaacuaaaauu

SEQ ID NO: 3550 - RNA, 20 nt, Artificial Sequence
  SAMD9L targeting guide sequence portion
agcacuauccuuaaacuaaa

SEQ ID NO: 3551 - RNA, 20 nt, Artificial Sequence
  SAMD9L targeting guide sequence portion
agucaccaauuuuaguuuaa

SEQ ID NO: 3552 - RNA, 20 nt, Artificial Sequence
  SAMD9L targeting guide sequence portion
auccuuaaacuaaaauuggu

SEQ ID NO: 3553 - RNA, 20 nt, Artificial Sequence
  SAMD9L targeting guide sequence portion
augaccgagucaccaauuuu

SEQ ID NO: 3554 - RNA, 20 nt, Artificial Sequence
  SAMD9L targeting guide sequence portion
auuggugacucggucaucaa

SEQ ID NO: 3555 - RNA, 20 nt, Artificial Sequence
  SAMD9L targeting guide sequence portion
caauuuuaguuuaaggauag

SEQ ID NO: 3556 - RNA, 20 nt, Artificial Sequence
  SAMD9L targeting guide sequence portion
caccaauuuuaguuuaagga

SEQ ID NO: 3557 - RNA, 20 nt, Artificial Sequence
  SAMD9L targeting guide sequence portion
cacuauccuuaaacuaaaau

SEQ ID NO: 3558 - RNA, 20 nt, Artificial Sequence
  SAMD9L targeting guide sequence portion
cagcacuauccuuaaacuaa

SEQ ID NO: 3559 - RNA, 20 nt, Artificial Sequence
  SAMD9L targeting guide sequence portion
ccaauuuuaguuuaaggaua

SEQ ID NO: 3560 - RNA, 20 nt, Artificial Sequence
  SAMD9L targeting guide sequence portion
ccgagucaccaauuuuaguu

SEQ ID NO: 3561 - RNA, 20 nt, Artificial Sequence
  SAMD9L targeting guide sequence portion
ccuuaaacuaaaauugguga

SEQ ID NO: 3562 - RNA, 20 nt, Artificial Sequence
  SAMD9L targeting guide sequence portion
ccuucuugaugaccgaguca

SEQ ID NO: 3563 - RNA, 20 nt, Artificial Sequence
  SAMD9L targeting guide sequence portion
cgagucaccaauuuuaguuu

SEQ ID NO: 3564 - RNA, 20 nt, Artificial Sequence
  SAMD9L targeting guide sequence portion
cuaaaauuggugacucgguc

SEQ ID NO: 3565 - RNA, 20 nt, Artificial Sequence
  SAMD9L targeting guide sequence portion
cuauccuuaaacuaaaauug

SEQ ID NO: 3566 - RNA, 20 nt, Artificial Sequence
  SAMD9L targeting guide sequence portion
cuuaaacuaaaauuggugac

SEQ ID NO: 3567 - RNA, 20 nt, Artificial Sequence
  SAMD9L targeting guide sequence portion
cuucuugaugaccgagucac

SEQ ID NO: 3568 - RNA, 20 nt, Artificial Sequence
  SAMD9L targeting guide sequence portion
cuugaugaccgagucaccaa

SEQ ID NO: 3569 - RNA, 20 nt, Artificial Sequence
  SAMD9L targeting guide sequence portion
gaccgagucaccaauuuuag

SEQ ID NO: 3570 - RNA, 20 nt, Artificial Sequence
  SAMD9L targeting guide sequence portion
gagucaccaauuuuaguuua

SEQ ID NO: 3571 - RNA, 20 nt, Artificial Sequence
  SAMD9L targeting guide sequence portion
gaugaccgagucaccaauuu

SEQ ID NO: 3572 - RNA, 20 nt, Artificial Sequence
  SAMD9L targeting guide sequence portion
gcacuauccuuaaacuaaaa

SEQ ID NO: 3573 - RNA, 20 nt, Artificial Sequence
  SAMD9L targeting guide sequence portion
gucaccaauuuuaguuuaag

SEQ ID NO: 3574 - RNA, 20 nt, Artificial Sequence
  SAMD9L targeting guide sequence portion
uaaaauuggugacucgguca

SEQ ID NO: 3575 - RNA, 20 nt, Artificial Sequence
  SAMD9L targeting guide sequence portion
uaaacuaaaauuggugacuc

SEQ ID NO: 3576 - RNA, 20 nt, Artificial Sequence
  SAMD9L targeting guide sequence portion
uauccuuaaacuaaaauugg

SEQ ID NO: 3577 - RNA, 20 nt, Artificial Sequence
  SAMD9L targeting guide sequence portion
ucaccaauuuuaguuuaagg

SEQ ID NO: 3578 - RNA, 20 nt, Artificial Sequence
  SAMD9L targeting guide sequence portion
uccuuaaacuaaaauuggug

SEQ ID NO: 3579 - RNA, 20 nt, Artificial Sequence
  SAMD9L targeting guide sequence portion
ucuugaugaccgagucacca

SEQ ID NO: 3580 - RNA, 20 nt, Artificial Sequence
  SAMD9L targeting guide sequence portion
ugaccgagucaccaauuuua

SEQ ID NO: 3581 - RNA, 20 nt, Artificial Sequence
  SAMD9L targeting guide sequence portion
ugaugaccgagucaccaauu

SEQ ID NO: 3582 - RNA, 20 nt, Artificial Sequence
  SAMD9L targeting guide sequence portion
uggugacucggucaucaaga

SEQ ID NO: 3583 - RNA, 20 nt, Artificial Sequence
  SAMD9L targeting guide sequence portion
uuaaacuaaaauuggugacu

SEQ ID NO: 3584 - RNA, 20 nt, Artificial Sequence
  SAMD9L targeting guide sequence portion
uucuugaugaccgagucacc

SEQ ID NO: 3585 - RNA, 20 nt, Artificial Sequence
  SAMD9L targeting guide sequence portion
uugaugaccgagucaccaau

SEQ ID NO: 3586 - RNA, 20 nt, Artificial Sequence
  SAMD9L targeting guide sequence portion
uuggugacucggucaucaag

SEQ ID NO: 3587 - RNA, 21 nt, Artificial Sequence
  SAMD9L targeting guide sequence portion
aaaaccuucuugaugaccgag

SEQ ID NO: 3588 - RNA, 21 nt, Artificial Sequence
  SAMD9L targeting guide sequence portion
aaaauuggugacucggucauc

SEQ ID NO: 3589 - RNA, 21 nt, Artificial Sequence
  SAMD9L targeting guide sequence portion
aaacagcacuauccuuaaacu

SEQ ID NO: 3590 - RNA, 21 nt, Artificial Sequence
  SAMD9L targeting guide sequence portion
aaaccuucuugaugaccgagu

SEQ ID NO: 3591 - RNA, 21 nt, Artificial Sequence
  SAMD9L targeting guide sequence portion
aaacuaaaauuggugacucgg

SEQ ID NO: 3592 - RNA, 21 nt, Artificial Sequence
  SAMD9L targeting guide sequence portion
aaauuggugacucggucauca

SEQ ID NO: 3593 - RNA, 21 nt, Artificial Sequence
  SAMD9L targeting guide sequence portion
aacagcacuauccuuaaacua

SEQ ID NO: 3594 - RNA, 21 nt, Artificial Sequence
  SAMD9L targeting guide sequence portion
aaccuucuugaugaccgaguc

SEQ ID NO: 3595 - RNA, 21 nt, Artificial Sequence
  SAMD9L targeting guide sequence portion
aacuaaaauuggugacucggu

SEQ ID NO: 3596 - RNA, 21 nt, Artificial Sequence
  SAMD9L targeting guide sequence portion
aauuggugacucggucaucaa

SEQ ID NO: 3597 - RNA, 21 nt, Artificial Sequence
  SAMD9L targeting guide sequence portion
aauuuuaguuuaaggauagug

SEQ ID NO: 3598 - RNA, 21 nt, Artificial Sequence
  SAMD9L targeting guide sequence portion
acagcacuauccuuaaacuaa

SEQ ID NO: 3599 - RNA, 21 nt, Artificial Sequence
  SAMD9L targeting guide sequence portion
accaauuuuaguuuaaggaua

SEQ ID NO: 3600 - RNA, 21 nt, Artificial Sequence
  SAMD9L targeting guide sequence portion
accgagucaccaauuuuaguu

SEQ ID NO: 3601 - RNA, 21 nt, Artificial Sequence
  SAMD9L targeting guide sequence portion
accuucuugaugaccgaguca

SEQ ID NO: 3602 - RNA, 21 nt, Artificial Sequence
  SAMD9L targeting guide sequence portion
acuaaaauuggugacucgguc

SEQ ID NO: 3603 - RNA, 21 nt, Artificial Sequence
  SAMD9L targeting guide sequence portion
acuauccuuaaacuaaaauug

SEQ ID NO: 3604 - RNA, 21 nt, Artificial Sequence
  SAMD9L targeting guide sequence portion
agcacuauccuuaaacuaaaa

SEQ ID NO: 3605 - RNA, 21 nt, Artificial Sequence
  SAMD9L targeting guide sequence portion
agucaccaauuuuaguuuaag

SEQ ID NO: 3606 - RNA, 21 nt, Artificial Sequence
  SAMD9L targeting guide sequence portion
auccuuaaacuaaaauuggug

SEQ ID NO: 3607 - RNA, 21 nt, Artificial Sequence
  SAMD9L targeting guide sequence portion
augaccgagucaccaauuuua

SEQ ID NO: 3608 - RNA, 21 nt, Artificial Sequence
  SAMD9L targeting guide sequence portion
auuggugacucggucaucaag

SEQ ID NO: 3609 - RNA, 21 nt, Artificial Sequence
  SAMD9L targeting guide sequence portion
caauuuuaguuuaaggauagu

SEQ ID NO: 3610 - RNA, 21 nt, Artificial Sequence
  SAMD9L targeting guide sequence portion
caccaauuuuaguuuaaggau

SEQ ID NO: 3611 - RNA, 21 nt, Artificial Sequence
  SAMD9L targeting guide sequence portion
cacuauccuuaaacuaaaauu

SEQ ID NO: 3612 - RNA, 21 nt, Artificial Sequence
  SAMD9L targeting guide sequence portion
cagcacuauccuuaaacuaaa

SEQ ID NO: 3613 - RNA, 21 nt, Artificial Sequence
  SAMD9L targeting guide sequence portion
ccaauuuuaguuuaaggauag

SEQ ID NO: 3614 - RNA, 21 nt, Artificial Sequence
  SAMD9L targeting guide sequence portion
ccgagucaccaauuuuaguuu

SEQ ID NO: 3615 - RNA, 21 nt, Artificial Sequence
  SAMD9L targeting guide sequence portion
ccuuaaacuaaaauuggugac

SEQ ID NO: 3616 - RNA, 21 nt, Artificial Sequence
  SAMD9L targeting guide sequence portion
ccuucuugaugaccgagucac

SEQ ID NO: 3617 - RNA, 21 nt, Artificial Sequence
  SAMD9L targeting guide sequence portion
cgagucaccaauuuuaguuua

SEQ ID NO: 3618 - RNA, 21 nt, Artificial Sequence
  SAMD9L targeting guide sequence portion
cuaaaauuggugacucgguca

SEQ ID NO: 3619 - RNA, 21 nt, Artificial Sequence
  SAMD9L targeting guide sequence portion
cuauccuuaaacuaaaauugg

SEQ ID NO: 3620 - RNA, 21 nt, Artificial Sequence
  SAMD9L targeting guide sequence portion
cuuaaacuaaaauuggugacu

SEQ ID NO: 3621 - RNA, 21 nt, Artificial Sequence
  SAMD9L targeting guide sequence portion
cuucuugaugaccgagucacc

SEQ ID NO: 3622 - RNA, 21 nt, Artificial Sequence
  SAMD9L targeting guide sequence portion
cuugaugaccgagucaccaau

SEQ ID NO: 3623 - RNA, 21 nt, Artificial Sequence
  SAMD9L targeting guide sequence portion
gaccgagucaccaauuuuagu

SEQ ID NO: 3624 - RNA, 21 nt, Artificial Sequence
  SAMD9L targeting guide sequence portion
gagucaccaauuuuaguuuaa

SEQ ID NO: 3625 - RNA, 21 nt, Artificial Sequence
  SAMD9L targeting guide sequence portion
gaugaccgagucaccaauuuu

SEQ ID NO: 3626 - RNA, 21 nt, Artificial Sequence
  SAMD9L targeting guide sequence portion
gcacuauccuuaaacuaaaau

SEQ ID NO: 3627 - RNA, 21 nt, Artificial Sequence
  SAMD9L targeting guide sequence portion
gucaccaauuuuaguuuaagg

SEQ ID NO: 3628 - RNA, 21 nt, Artificial Sequence
  SAMD9L targeting guide sequence portion
uaaaauuggugacucggucau

SEQ ID NO: 3629 - RNA, 21 nt, Artificial Sequence
  SAMD9L targeting guide sequence portion
uaaacuaaaauuggugacucg

SEQ ID NO: 3630 - RNA, 21 nt, Artificial Sequence
  SAMD9L targeting guide sequence portion
uauccuuaaacuaaaauuggu

SEQ ID NO: 3631 - RNA, 21 nt, Artificial Sequence
  SAMD9L targeting guide sequence portion
ucaccaauuuuaguuuaagga

SEQ ID NO: 3632 - RNA, 21 nt, Artificial Sequence
  SAMD9L targeting guide sequence portion
uccuuaaacuaaaauugguga

SEQ ID NO: 3633 - RNA, 21 nt, Artificial Sequence
  SAMD9L targeting guide sequence portion
ucuugaugaccgagucaccaa

SEQ ID NO: 3634 - RNA, 21 nt, Artificial Sequence
  SAMD9L targeting guide sequence portion
ugaccgagucaccaauuuuag

SEQ ID NO: 3635 - RNA, 21 nt, Artificial Sequence
  SAMD9L targeting guide sequence portion
ugaugaccgagucaccaauuu

SEQ ID NO: 3636 - RNA, 21 nt, Artificial Sequence
  SAMD9L targeting guide sequence portion
uggugacucggucaucaagaa

SEQ ID NO: 3637 - RNA, 21 nt, Artificial Sequence
  SAMD9L targeting guide sequence portion
uuaaacuaaaauuggugacuc

SEQ ID NO: 3638 - RNA, 21 nt, Artificial Sequence
  SAMD9L targeting guide sequence portion
uucuugaugaccgagucacca

SEQ ID NO: 3639 - RNA, 21 nt, Artificial Sequence
  SAMD9L targeting guide sequence portion
uugaugaccgagucaccaauu

SEQ ID NO: 3640 - RNA, 21 nt, Artificial Sequence
  SAMD9L targeting guide sequence portion
uuggugacucggucaucaaga

SEQ ID NO: 3641 - RNA, 22 nt, Artificial Sequence
  SAMD9L targeting guide sequence portion
aaaaaccuucuugaugaccgag

SEQ ID NO: 3642 - RNA, 22 nt, Artificial Sequence
  SAMD9L targeting guide sequence portion
aaaaccuucuugaugaccgagu

SEQ ID NO: 3643 - RNA, 22 nt, Artificial Sequence
  SAMD9L targeting guide sequence portion
aaaauuggugacucggucauca

SEQ ID NO: 3644 - RNA, 22 nt, Artificial Sequence
  SAMD9L targeting guide sequence portion
aaacagcacuauccuuaaacua

SEQ ID NO: 3645 - RNA, 22 nt, Artificial Sequence
  SAMD9L targeting guide sequence portion
aaaccuucuugaugaccgaguc

SEQ ID NO: 3646 - RNA, 22 nt, Artificial Sequence
  SAMD9L targeting guide sequence portion
aaacuaaaauuggugacucggu

SEQ ID NO: 3647 - RNA, 22 nt, Artificial Sequence
  SAMD9L targeting guide sequence portion
aaauuggugacucggucaucaa

SEQ ID NO: 3648 - RNA, 22 nt, Artificial Sequence
  SAMD9L targeting guide sequence portion
aacagcacuauccuuaaacuaa

SEQ ID NO: 3649 - RNA, 22 nt, Artificial Sequence
  SAMD9L targeting guide sequence portion
aaccuucuugaugaccgaguca

SEQ ID NO: 3650 - RNA, 22 nt, Artificial Sequence
  SAMD9L targeting guide sequence portion
aacuaaaauuggugacucgguc

SEQ ID NO: 3651 - RNA, 22 nt, Artificial Sequence
  SAMD9L targeting guide sequence portion
aauuggugacucggucaucaag

SEQ ID NO: 3652 - RNA, 22 nt, Artificial Sequence
  SAMD9L targeting guide sequence portion
aauuuuaguuuaaggauagugc

SEQ ID NO: 3653 - RNA, 22 nt, Artificial Sequence
  SAMD9L targeting guide sequence portion
acagcacuauccuuaaacuaaa

SEQ ID NO: 3654 - RNA, 22 nt, Artificial Sequence
  SAMD9L targeting guide sequence portion
accaauuuuaguuuaaggauag

SEQ ID NO: 3655 - RNA, 22 nt, Artificial Sequence
  SAMD9L targeting guide sequence portion
accgagucaccaauuuuaguuu

SEQ ID NO: 3656 - RNA, 22 nt, Artificial Sequence
  SAMD9L targeting guide sequence portion
accuucuugaugaccgagucac

SEQ ID NO: 3657 - RNA, 22 nt, Artificial Sequence
  SAMD9L targeting guide sequence portion
acuaaaauuggugacucgguca

SEQ ID NO: 3658 - RNA, 22 nt, Artificial Sequence
  SAMD9L targeting guide sequence portion
acuauccuuaaacuaaaauugg

SEQ ID NO: 3659 - RNA, 22 nt, Artificial Sequence
  SAMD9L targeting guide sequence portion
agcacuauccuuaaacuaaaau

SEQ ID NO: 3660 - RNA, 22 nt, Artificial Sequence
  SAMD9L targeting guide sequence portion
agucaccaauuuuaguuuaagg

SEQ ID NO: 3661 - RNA, 22 nt, Artificial Sequence
  SAMD9L targeting guide sequence portion
auccuuaaacuaaaauugguga

SEQ ID NO: 3662 - RNA, 22 nt, Artificial Sequence
  SAMD9L targeting guide sequence portion
augaccgagucaccaauuuuag

SEQ ID NO: 3663 - RNA, 22 nt, Artificial Sequence
  SAMD9L targeting guide sequence portion
auuggugacucggucaucaaga

SEQ ID NO: 3664 - RNA, 22 nt, Artificial Sequence
  SAMD9L targeting guide sequence portion
caauuuuaguuuaaggauagug

SEQ ID NO: 3665 - RNA, 22 nt, Artificial Sequence
  SAMD9L targeting guide sequence portion
caccaauuuuaguuuaaggaua

SEQ ID NO: 3666 - RNA, 22 nt, Artificial Sequence
  SAMD9L targeting guide sequence portion
cacuauccuuaaacuaaaauug

SEQ ID NO: 3667 - RNA, 22 nt, Artificial Sequence
  SAMD9L targeting guide sequence portion
cagcacuauccuuaaacuaaaa

SEQ ID NO: 3668 - RNA, 22 nt, Artificial Sequence
  SAMD9L targeting guide sequence portion
ccaauuuuaguuuaaggauagu

SEQ ID NO: 3669 - RNA, 22 nt, Artificial Sequence
  SAMD9L targeting guide sequence portion
ccgagucaccaauuuuaguuua

SEQ ID NO: 3670 - RNA, 22 nt, Artificial Sequence
  SAMD9L targeting guide sequence portion
ccuuaaacuaaaauuggugacu

SEQ ID NO: 3671 - RNA, 22 nt, Artificial Sequence
  SAMD9L targeting guide sequence portion
ccuucuugaugaccgagucacc

SEQ ID NO: 3672 - RNA, 22 nt, Artificial Sequence
  SAMD9L targeting guide sequence portion
cgagucaccaauuuuaguuuaa

SEQ ID NO: 3673 - RNA, 22 nt, Artificial Sequence
  SAMD9L targeting guide sequence portion
cuaaaauuggugacucggucau

SEQ ID NO: 3674 - RNA, 22 nt, Artificial Sequence
  SAMD9L targeting guide sequence portion
cuauccuuaaacuaaaauuggu

SEQ ID NO: 3675 - RNA, 22 nt, Artificial Sequence
  SAMD9L targeting guide sequence portion
cuuaaacuaaaauuggugacuc

SEQ ID NO: 3676 - RNA, 22 nt, Artificial Sequence
  SAMD9L targeting guide sequence portion
cuucuugaugaccgagucacca

SEQ ID NO: 3677 - RNA, 22 nt, Artificial Sequence
  SAMD9L targeting guide sequence portion
cuugaugaccgagucaccaauu

SEQ ID NO: 3678 - RNA, 22 nt, Artificial Sequence
  SAMD9L targeting guide sequence portion
gaccgagucaccaauuuuaguu

SEQ ID NO: 3679 - RNA, 22 nt, Artificial Sequence
  SAMD9L targeting guide sequence portion
gagucaccaauuuuaguuuaag

SEQ ID NO: 3680 - RNA, 22 nt, Artificial Sequence
  SAMD9L targeting guide sequence portion
gaugaccgagucaccaauuuua

SEQ ID NO: 3681 - RNA, 22 nt, Artificial Sequence
  SAMD9L targeting guide sequence portion
gcacuauccuuaaacuaaaauu

SEQ ID NO: 3682 - RNA, 22 nt, Artificial Sequence
  SAMD9L targeting guide sequence portion
gucaccaauuuuaguuuaagga

SEQ ID NO: 3683 - RNA, 22 nt, Artificial Sequence
  SAMD9L targeting guide sequence portion
uaaaauuggugacucggucauc

SEQ ID NO: 3684 - RNA, 22 nt, Artificial Sequence
  SAMD9L targeting guide sequence portion
uaaacagcacuauccuuaaacu

SEQ ID NO: 3685 - RNA, 22 nt, Artificial Sequence
  SAMD9L targeting guide sequence portion
uaaacuaaaauuggugacucgg

SEQ ID NO: 3686 - RNA, 22 nt, Artificial Sequence
  SAMD9L targeting guide sequence portion
uauccuuaaacuaaaauuggug

SEQ ID NO: 3687 - RNA, 22 nt, Artificial Sequence
  SAMD9L targeting guide sequence portion
ucaccaauuuuaguuuaaggau

SEQ ID NO: 3688 - RNA, 22 nt, Artificial Sequence
  SAMD9L targeting guide sequence portion
uccuuaaacuaaaauuggugac

SEQ ID NO: 3689 - RNA, 22 nt, Artificial Sequence
  SAMD9L targeting guide sequence portion
ucuugaugaccgagucaccaau

SEQ ID NO: 3690 - RNA, 22 nt, Artificial Sequence
  SAMD9L targeting guide sequence portion
ugaccgagucaccaauuuuagu

SEQ ID NO: 3691 - RNA, 22 nt, Artificial Sequence
  SAMD9L targeting guide sequence portion
ugaugaccgagucaccaauuuu

SEQ ID NO: 3692 - RNA, 22 nt, Artificial Sequence
  SAMD9L targeting guide sequence portion
uggugacucggucaucaagaag

SEQ ID NO: 3693 - RNA, 22 nt, Artificial Sequence
  SAMD9L targeting guide sequence portion
uuaaacuaaaauuggugacucg

SEQ ID NO: 3694 - RNA, 22 nt, Artificial Sequence
  SAMD9L targeting guide sequence portion
uucuugaugaccgagucaccaa

SEQ ID NO: 3695 - RNA, 22 nt, Artificial Sequence
  SAMD9L targeting guide sequence portion
uugaugaccgagucaccaauuu

SEQ ID NO: 3696 - RNA, 22 nt, Artificial Sequence
  SAMD9L targeting guide sequence portion
uuggugacucggucaucaagaa

SEQ ID NO: 3697 - RNA, 20 nt, Artificial Sequence
  SAMD9L targeting guide sequence portion
aaaccucuagaaccacauuu

SEQ ID NO: 3698 - RNA, 20 nt, Artificial Sequence
  SAMD9L targeting guide sequence portion
aaccacauuuaaggcagaga

SEQ ID NO: 3699 - RNA, 20 nt, Artificial Sequence
  SAMD9L targeting guide sequence portion
aaccucuagaaccacauuua

SEQ ID NO: 3700 - RNA, 20 nt, Artificial Sequence
  SAMD9L targeting guide sequence portion
aagcucuuucucucugccuu

SEQ ID NO: 3701 - RNA, 20 nt, Artificial Sequence
  SAMD9L targeting guide sequence portion
aaggcagagagaaagagcuu

SEQ ID NO: 3702 - RNA, 20 nt, Artificial Sequence
  SAMD9L targeting guide sequence portion
acauuuaaggcagagagaaa

SEQ ID NO: 3703 - RNA, 20 nt, Artificial Sequence
  SAMD9L targeting guide sequence portion
accacauuuaaggcagagag

SEQ ID NO: 3704 - RNA, 20 nt, Artificial Sequence
  SAMD9L targeting guide sequence portion
accucuagaaccacauuuaa

SEQ ID NO: 3705 - RNA, 20 nt, Artificial Sequence
  SAMD9L targeting guide sequence portion
acuucugaagcucuuucucu

SEQ ID NO: 3706 - RNA, 20 nt, Artificial Sequence
  SAMD9L targeting guide sequence portion
agaaccacauuuaaggcaga

SEQ ID NO: 3707 - RNA, 20 nt, Artificial Sequence
  SAMD9L targeting guide sequence portion
agcucuuucucucugccuua

SEQ ID NO: 3708 - RNA, 20 nt, Artificial Sequence
  SAMD9L targeting guide sequence portion
aggcagagagaaagagcuuc

SEQ ID NO: 3709 - RNA, 20 nt, Artificial Sequence
  SAMD9L targeting guide sequence portion
auaaaccucuagaaccacau

SEQ ID NO: 3710 - RNA, 20 nt, Artificial Sequence
  SAMD9L targeting guide sequence portion
auauaaaccucuagaaccac

SEQ ID NO: 3711 - RNA, 20 nt, Artificial Sequence
  SAMD9L targeting guide sequence portion
auuuaaggcagagagaaaga

SEQ ID NO: 3712 - RNA, 20 nt, Artificial Sequence
  SAMD9L targeting guide sequence portion
cacauuuaaggcagagagaa

SEQ ID NO: 3713 - RNA, 20 nt, Artificial Sequence
  SAMD9L targeting guide sequence portion
cauuuaaggcagagagaaag

SEQ ID NO: 3714 - RNA, 20 nt, Artificial Sequence
  SAMD9L targeting guide sequence portion
ccacauuuaaggcagagaga

SEQ ID NO: 3715 - RNA, 20 nt, Artificial Sequence
  SAMD9L targeting guide sequence portion
ccucuagaaccacauuuaag

SEQ ID NO: 3716 - RNA, 20 nt, Artificial Sequence
  SAMD9L targeting guide sequence portion
ccuuaaaugugguucuagag

SEQ ID NO: 3717 - RNA, 20 nt, Artificial Sequence
  SAMD9L targeting guide sequence portion
cuagaaccacauuuaaggca

SEQ ID NO: 3718 - RNA, 20 nt, Artificial Sequence
  SAMD9L targeting guide sequence portion
cucuagaaccacauuuaagg

SEQ ID NO: 3719 - RNA, 20 nt, Artificial Sequence
  SAMD9L targeting guide sequence portion
cucucugccuuaaauguggu

SEQ ID NO: 3720 - RNA, 20 nt, Artificial Sequence
  SAMD9L targeting guide sequence portion
cucugccuuaaaugugguuc

SEQ ID NO: 3721 - RNA, 20 nt, Artificial Sequence
  SAMD9L targeting guide sequence portion
cucuuucucucugccuuaaa

SEQ ID NO: 3722 - RNA, 20 nt, Artificial Sequence
  SAMD9L targeting guide sequence portion
cugaagcucuuucucucugc

SEQ ID NO: 3723 - RNA, 20 nt, Artificial Sequence
  SAMD9L targeting guide sequence portion
cugccuuaaaugugguucua

SEQ ID NO: 3724 - RNA, 20 nt, Artificial Sequence
  SAMD9L targeting guide sequence portion
cuuaaaugugguucuagagg

SEQ ID NO: 3725 - RNA, 20 nt, Artificial Sequence
  SAMD9L targeting guide sequence portion
cuucugaagcucuuucucuc

SEQ ID NO: 3726 - RNA, 20 nt, Artificial Sequence
  SAMD9L targeting guide sequence portion
cuuucucucugccuuaaaug

SEQ ID NO: 3727 - RNA, 20 nt, Artificial Sequence
  SAMD9L targeting guide sequence portion
gaaccacauuuaaggcagag

SEQ ID NO: 3728 - RNA, 20 nt, Artificial Sequence
  SAMD9L targeting guide sequence portion
gaagcucuuucucucugccu

SEQ ID NO: 3729 - RNA, 20 nt, Artificial Sequence
  SAMD9L targeting guide sequence portion
gccuuaaaugugguucuaga

SEQ ID NO: 3730 - RNA, 20 nt, Artificial Sequence
  SAMD9L targeting guide sequence portion
gcucuuucucucugccuuaa

SEQ ID NO: 3731 - RNA, 20 nt, Artificial Sequence
  SAMD9L targeting guide sequence portion
uaaaccucuagaaccacauu

SEQ ID NO: 3732 - RNA, 20 nt, Artificial Sequence
  SAMD9L targeting guide sequence portion
uaaggcagagagaaagagcu

SEQ ID NO: 3733 - RNA, 20 nt, Artificial Sequence
  SAMD9L targeting guide sequence portion
uagaaccacauuuaaggcag

SEQ ID NO: 3734 - RNA, 20 nt, Artificial Sequence
  SAMD9L targeting guide sequence portion
uauaaaccucuagaaccaca

SEQ ID NO: 3735 - RNA, 20 nt, Artificial Sequence
  SAMD9L targeting guide sequence portion
ucuagaaccacauuuaaggc

SEQ ID NO: 3736 - RNA, 20 nt, Artificial Sequence
  SAMD9L targeting guide sequence portion
ucucucugccuuaaaugugg

SEQ ID NO: 3737 - RNA, 20 nt, Artificial Sequence
  SAMD9L targeting guide sequence portion
ucucugccuuaaaugugguu

SEQ ID NO: 3738 - RNA, 20 nt, Artificial Sequence
  SAMD9L targeting guide sequence portion
ucugaagcucuuucucucug

SEQ ID NO: 3739 - RNA, 20 nt, Artificial Sequence
  SAMD9L targeting guide sequence portion
ucugccuuaaaugugguucu

SEQ ID NO: 3740 - RNA, 20 nt, Artificial Sequence
  SAMD9L targeting guide sequence portion
ucuuucucucugccuuaaau

SEQ ID NO: 3741 - RNA, 20 nt, Artificial Sequence
  SAMD9L targeting guide sequence portion
ugaagcucuuucucucugcc

SEQ ID NO: 3742 - RNA, 20 nt, Artificial Sequence
  SAMD9L targeting guide sequence portion
ugccuuaaaugugguucuag

SEQ ID NO: 3743 - RNA, 20 nt, Artificial Sequence
  SAMD9L targeting guide sequence portion
uuaaaugugguucuagaggu

SEQ ID NO: 3744 - RNA, 20 nt, Artificial Sequence
  SAMD9L targeting guide sequence portion
uuaaggcagagagaaagagc

SEQ ID NO: 3745 - RNA, 20 nt, Artificial Sequence
  SAMD9L targeting guide sequence portion
uucucucugccuuaaaugug

SEQ ID NO: 3746 - RNA, 20 nt, Artificial Sequence
  SAMD9L targeting guide sequence portion
uucugaagcucuuucucucu

SEQ ID NO: 3747 - RNA, 20 nt, Artificial Sequence
  SAMD9L targeting guide sequence portion
uuuaaggcagagagaaagag

SEQ ID NO: 3748 - RNA, 20 nt, Artificial Sequence
  SAMD9L targeting guide sequence portion
uuucucucugccuuaaaugu

SEQ ID NO: 3749 - RNA, 21 nt, Artificial Sequence
  SAMD9L targeting guide sequence portion
aaaccucuagaaccacauuua

SEQ ID NO: 3750 - RNA, 21 nt, Artificial Sequence
  SAMD9L targeting guide sequence portion
aaccacauuuaaggcagagag

SEQ ID NO: 3751 - RNA, 21 nt, Artificial Sequence
  SAMD9L targeting guide sequence portion
aaccucuagaaccacauuuaa

SEQ ID NO: 3752 - RNA, 21 nt, Artificial Sequence
  SAMD9L targeting guide sequence portion
aagcucuuucucucugccuua

SEQ ID NO: 3753 - RNA, 21 nt, Artificial Sequence
  SAMD9L targeting guide sequence portion
aaggcagagagaaagagcuuc

SEQ ID NO: 3754 - RNA, 21 nt, Artificial Sequence
  SAMD9L targeting guide sequence portion
acauuuaaggcagagagaaag

SEQ ID NO: 3755 - RNA, 21 nt, Artificial Sequence
  SAMD9L targeting guide sequence portion
accacauuuaaggcagagaga

SEQ ID NO: 3756 - RNA, 21 nt, Artificial Sequence
  SAMD9L targeting guide sequence portion
accucuagaaccacauuuaag

SEQ ID NO: 3757 - RNA, 21 nt, Artificial Sequence
  SAMD9L targeting guide sequence portion
acuucugaagcucuuucucuc

SEQ ID NO: 3758 - RNA, 21 nt, Artificial Sequence
  SAMD9L targeting guide sequence portion
agaaccacauuuaaggcagag

SEQ ID NO: 3759 - RNA, 21 nt, Artificial Sequence
  SAMD9L targeting guide sequence portion
agcucuuucucucugccuuaa

SEQ ID NO: 3760 - RNA, 21 nt, Artificial Sequence
  SAMD9L targeting guide sequence portion
aggcagagagaaagagcuuca

SEQ ID NO: 3761 - RNA, 21 nt, Artificial Sequence
  SAMD9L targeting guide sequence portion
auaaaccucuagaaccacauu

SEQ ID NO: 3762 - RNA, 21 nt, Artificial Sequence
  SAMD9L targeting guide sequence portion
auauaaaccucuagaaccaca

SEQ ID NO: 3763 - RNA, 21 nt, Artificial Sequence
  SAMD9L targeting guide sequence portion
auuuaaggcagagagaaagag

SEQ ID NO: 3764 - RNA, 21 nt, Artificial Sequence
  SAMD9L targeting guide sequence portion
cacauuuaaggcagagagaaa

SEQ ID NO: 3765 - RNA, 21 nt, Artificial Sequence
  SAMD9L targeting guide sequence portion
cauauaaaccucuagaaccac

SEQ ID NO: 3766 - RNA, 21 nt, Artificial Sequence
  SAMD9L targeting guide sequence portion
cauuuaaggcagagagaaaga

SEQ ID NO: 3767 - RNA, 21 nt, Artificial Sequence
  SAMD9L targeting guide sequence portion
ccacauuuaaggcagagagaa

SEQ ID NO: 3768 - RNA, 21 nt, Artificial Sequence
  SAMD9L targeting guide sequence portion
ccucuagaaccacauuuaagg

SEQ ID NO: 3769 - RNA, 21 nt, Artificial Sequence
  SAMD9L targeting guide sequence portion
ccuuaaaugugguucuagagg

SEQ ID NO: 3770 - RNA, 21 nt, Artificial Sequence
  SAMD9L targeting guide sequence portion
cuagaaccacauuuaaggcag

SEQ ID NO: 3771 - RNA, 21 nt, Artificial Sequence
  SAMD9L targeting guide sequence portion
cucuagaaccacauuuaaggc

SEQ ID NO: 3772 - RNA, 21 nt, Artificial Sequence
  SAMD9L targeting guide sequence portion
cucucugccuuaaaugugguu

SEQ ID NO: 3773 - RNA, 21 nt, Artificial Sequence
  SAMD9L targeting guide sequence portion
cucugccuuaaaugugguucu

SEQ ID NO: 3774 - RNA, 21 nt, Artificial Sequence
  SAMD9L targeting guide sequence portion
cucuuucucucugccuuaaau

SEQ ID NO: 3775 - RNA, 21 nt, Artificial Sequence
  SAMD9L targeting guide sequence portion
cugaagcucuuucucucugcc

SEQ ID NO: 3776 - RNA, 21 nt, Artificial Sequence
  SAMD9L targeting guide sequence portion
cugccuuaaaugugguucuag

SEQ ID NO: 3777 - RNA, 21 nt, Artificial Sequence
  SAMD9L targeting guide sequence portion
cuuaaaugugguucuagaggu

SEQ ID NO: 3778 - RNA, 21 nt, Artificial Sequence
  SAMD9L targeting guide sequence portion
cuucugaagcucuuucucucu

SEQ ID NO: 3779 - RNA, 21 nt, Artificial Sequence
  SAMD9L targeting guide sequence portion
cuuucucucugccuuaaaugu

SEQ ID NO: 3780 - RNA, 21 nt, Artificial Sequence
  SAMD9L targeting guide sequence portion
gaaccacauuuaaggcagaga

SEQ ID NO: 3781 - RNA, 21 nt, Artificial Sequence
  SAMD9L targeting guide sequence portion
gaagcucuuucucucugccuu

SEQ ID NO: 3782 - RNA, 21 nt, Artificial Sequence
  SAMD9L targeting guide sequence portion
gacuucugaagcucuuucucu

SEQ ID NO: 3783 - RNA, 21 nt, Artificial Sequence
  SAMD9L targeting guide sequence portion
gccuuaaaugugguucuagag

SEQ ID NO: 3784 - RNA, 21 nt, Artificial Sequence
  SAMD9L targeting guide sequence portion
gcucuuucucucugccuuaaa

SEQ ID NO: 3785 - RNA, 21 nt, Artificial Sequence
  SAMD9L targeting guide sequence portion
uaaaccucuagaaccacauuu

SEQ ID NO: 3786 - RNA, 21 nt, Artificial Sequence
  SAMD9L targeting guide sequence portion
uaaggcagagagaaagagcuu

SEQ ID NO: 3787 - RNA, 21 nt, Artificial Sequence
  SAMD9L targeting guide sequence portion
uagaaccacauuuaaggcaga

SEQ ID NO: 3788 - RNA, 21 nt, Artificial Sequence
  SAMD9L targeting guide sequence portion
uauaaaccucuagaaccacau

SEQ ID NO: 3789 - RNA, 21 nt, Artificial Sequence
  SAMD9L targeting guide sequence portion
ucuagaaccacauuuaaggca

SEQ ID NO: 3790 - RNA, 21 nt, Artificial Sequence
  SAMD9L targeting guide sequence portion
ucucucugccuuaaauguggu

SEQ ID NO: 3791 - RNA, 21 nt, Artificial Sequence
  SAMD9L targeting guide sequence portion
ucucugccuuaaaugugguuc

SEQ ID NO: 3792 - RNA, 21 nt, Artificial Sequence
  SAMD9L targeting guide sequence portion
ucugaagcucuuucucucugc

SEQ ID NO: 3793 - RNA, 21 nt, Artificial Sequence
  SAMD9L targeting guide sequence portion
ucugccuuaaaugugguucua

SEQ ID NO: 3794 - RNA, 21 nt, Artificial Sequence
  SAMD9L targeting guide sequence portion
ucuuucucucugccuuaaaug

SEQ ID NO: 3795 - RNA, 21 nt, Artificial Sequence
  SAMD9L targeting guide sequence portion
ugaagcucuuucucucugccu

SEQ ID NO: 3796 - RNA, 21 nt, Artificial Sequence
  SAMD9L targeting guide sequence portion
ugccuuaaaugugguucuaga

SEQ ID NO: 3797 - RNA, 21 nt, Artificial Sequence
  SAMD9L targeting guide sequence portion
uuaaaugugguucuagagguu

SEQ ID NO: 3798 - RNA, 21 nt, Artificial Sequence
  SAMD9L targeting guide sequence portion
uuaaggcagagagaaagagcu

SEQ ID NO: 3799 - RNA, 21 nt, Artificial Sequence
  SAMD9L targeting guide sequence portion
uucucucugccuuaaaugugg

SEQ ID NO: 3800 - RNA, 21 nt, Artificial Sequence
  SAMD9L targeting guide sequence portion
uucugaagcucuuucucucug

SEQ ID NO: 3801 - RNA, 21 nt, Artificial Sequence
  SAMD9L targeting guide sequence portion
uuuaaggcagagagaaagagc

SEQ ID NO: 3802 - RNA, 21 nt, Artificial Sequence
  SAMD9L targeting guide sequence portion
uuucucucugccuuaaaugug

SEQ ID NO: 3803 - RNA, 22 nt, Artificial Sequence
  SAMD9L targeting guide sequence portion
aaaccucuagaaccacauuuaa

SEQ ID NO: 3804 - RNA, 22 nt, Artificial Sequence
  SAMD9L targeting guide sequence portion
aaccacauuuaaggcagagaga

SEQ ID NO: 3805 - RNA, 22 nt, Artificial Sequence
  SAMD9L targeting guide sequence portion
aaccucuagaaccacauuuaag

SEQ ID NO: 3806 - RNA, 22 nt, Artificial Sequence
  SAMD9L targeting guide sequence portion
aagcucuuucucucugccuuaa

SEQ ID NO: 3807 - RNA, 22 nt, Artificial Sequence
  SAMD9L targeting guide sequence portion
aaggcagagagaaagagcuuca

SEQ ID NO: 3808 - RNA, 22 nt, Artificial Sequence
  SAMD9L targeting guide sequence portion
acauauaaaccucuagaaccac

SEQ ID NO: 3809 - RNA, 22 nt, Artificial Sequence
  SAMD9L targeting guide sequence portion
acauuuaaggcagagagaaaga

SEQ ID NO: 3810 - RNA, 22 nt, Artificial Sequence
  SAMD9L targeting guide sequence portion
accacauuuaaggcagagagaa

SEQ ID NO: 3811 - RNA, 22 nt, Artificial Sequence
  SAMD9L targeting guide sequence portion
accucuagaaccacauuuaagg

SEQ ID NO: 3812 - RNA, 22 nt, Artificial Sequence
  SAMD9L targeting guide sequence portion
acuucugaagcucuuucucucu

SEQ ID NO: 3813 - RNA, 22 nt, Artificial Sequence
  SAMD9L targeting guide sequence portion
agaaccacauuuaaggcagaga

SEQ ID NO: 3814 - RNA, 22 nt, Artificial Sequence
  SAMD9L targeting guide sequence portion
agcucuuucucucugccuuaaa

SEQ ID NO: 3815 - RNA, 22 nt, Artificial Sequence
  SAMD9L targeting guide sequence portion
aggcagagagaaagagcuucag

SEQ ID NO: 3816 - RNA, 22 nt, Artificial Sequence
  SAMD9L targeting guide sequence portion
auaaaccucuagaaccacauuu

SEQ ID NO: 3817 - RNA, 22 nt, Artificial Sequence
  SAMD9L targeting guide sequence portion
auauaaaccucuagaaccacau

SEQ ID NO: 3818 - RNA, 22 nt, Artificial Sequence
  SAMD9L targeting guide sequence portion
auuuaaggcagagagaaagagc

SEQ ID NO: 3819 - RNA, 22 nt, Artificial Sequence
  SAMD9L targeting guide sequence portion
cacauuuaaggcagagagaaag

SEQ ID NO: 3820 - RNA, 22 nt, Artificial Sequence
  SAMD9L targeting guide sequence portion
cauauaaaccucuagaaccaca

SEQ ID NO: 3821 - RNA, 22 nt, Artificial Sequence
  SAMD9L targeting guide sequence portion
cauuuaaggcagagagaaagag

SEQ ID NO: 3822 - RNA, 22 nt, Artificial Sequence
  SAMD9L targeting guide sequence portion
ccacauuuaaggcagagagaaa

SEQ ID NO: 3823 - RNA, 22 nt, Artificial Sequence
  SAMD9L targeting guide sequence portion
ccucuagaaccacauuuaaggc

SEQ ID NO: 3824 - RNA, 22 nt, Artificial Sequence
  SAMD9L targeting guide sequence portion
ccuuaaaugugguucuagaggu

SEQ ID NO: 3825 - RNA, 22 nt, Artificial Sequence
  SAMD9L targeting guide sequence portion
cuagaaccacauuuaaggcaga

SEQ ID NO: 3826 - RNA, 22 nt, Artificial Sequence
  SAMD9L targeting guide sequence portion
cucuagaaccacauuuaaggca

SEQ ID NO: 3827 - RNA, 22 nt, Artificial Sequence
  SAMD9L targeting guide sequence portion
cucucugccuuaaaugugguuc

SEQ ID NO: 3828 - RNA, 22 nt, Artificial Sequence
  SAMD9L targeting guide sequence portion
cucugccuuaaaugugguucua

SEQ ID NO: 3829 - RNA, 22 nt, Artificial Sequence
  SAMD9L targeting guide sequence portion
cucuuucucucugccuuaaaug

SEQ ID NO: 3830 - RNA, 22 nt, Artificial Sequence
  SAMD9L targeting guide sequence portion
cugaagcucuuucucucugccu

SEQ ID NO: 3831 - RNA, 22 nt, Artificial Sequence
  SAMD9L targeting guide sequence portion
cugccuuaaaugugguucuaga

SEQ ID NO: 3832 - RNA, 22 nt, Artificial Sequence
  SAMD9L targeting guide sequence portion
cuuaaaugugguucuagagguu

SEQ ID NO: 3833 - RNA, 22 nt, Artificial Sequence
  SAMD9L targeting guide sequence portion
cuucugaagcucuuucucucug

SEQ ID NO: 3834 - RNA, 22 nt, Artificial Sequence
  SAMD9L targeting guide sequence portion
cuuucucucugccuuaaaugug

SEQ ID NO: 3835 - RNA, 22 nt, Artificial Sequence
  SAMD9L targeting guide sequence portion
gaaccacauuuaaggcagagag

SEQ ID NO: 3836 - RNA, 22 nt, Artificial Sequence
  SAMD9L targeting guide sequence portion
gaagcucuuucucucugccuua

SEQ ID NO: 3837 - RNA, 22 nt, Artificial Sequence
  SAMD9L targeting guide sequence portion
gacuucugaagcucuuucucuc

SEQ ID NO: 3838 - RNA, 22 nt, Artificial Sequence
  SAMD9L targeting guide sequence portion
gccuuaaaugugguucuagagg

SEQ ID NO: 3839 - RNA, 22 nt, Artificial Sequence
  SAMD9L targeting guide sequence portion
gcucuuucucucugccuuaaau

SEQ ID NO: 3840 - RNA, 22 nt, Artificial Sequence
  SAMD9L targeting guide sequence portion
uaaaccucuagaaccacauuua

SEQ ID NO: 3841 - RNA, 22 nt, Artificial Sequence
  SAMD9L targeting guide sequence portion
uaaggcagagagaaagagcuuc

SEQ ID NO: 3842 - RNA, 22 nt, Artificial Sequence
  SAMD9L targeting guide sequence portion
uagaaccacauuuaaggcagag

SEQ ID NO: 3843 - RNA, 22 nt, Artificial Sequence
  SAMD9L targeting guide sequence portion
uauaaaccucuagaaccacauu

SEQ ID NO: 3844 - RNA, 22 nt, Artificial Sequence
  SAMD9L targeting guide sequence portion
ucuagaaccacauuuaaggcag

SEQ ID NO: 3845 - RNA, 22 nt, Artificial Sequence
  SAMD9L targeting guide sequence portion
ucucucugccuuaaaugugguu

SEQ ID NO: 3846 - RNA, 22 nt, Artificial Sequence
  SAMD9L targeting guide sequence portion
ucucugccuuaaaugugguucu

SEQ ID NO: 3847 - RNA, 22 nt, Artificial Sequence
  SAMD9L targeting guide sequence portion
ucugaagcucuuucucucugcc

SEQ ID NO: 3848 - RNA, 22 nt, Artificial Sequence
  SAMD9L targeting guide sequence portion
ucugccuuaaaugugguucuag

SEQ ID NO: 3849 - RNA, 22 nt, Artificial Sequence
  SAMD9L targeting guide sequence portion
ucuuucucucugccuuaaaugu

SEQ ID NO: 3850 - RNA, 22 nt, Artificial Sequence
  SAMD9L targeting guide sequence portion
ugaagcucuuucucucugccuu

SEQ ID NO: 3851 - RNA, 22 nt, Artificial Sequence
  SAMD9L targeting guide sequence portion
ugacuucugaagcucuuucucu

SEQ ID NO: 3852 - RNA, 22 nt, Artificial Sequence
  SAMD9L targeting guide sequence portion
ugccuuaaaugugguucuagag

SEQ ID NO: 3853 - RNA, 22 nt, Artificial Sequence
  SAMD9L targeting guide sequence portion
uuaaaugugguucuagagguuu

SEQ ID NO: 3854 - RNA, 22 nt, Artificial Sequence
  SAMD9L targeting guide sequence portion
uuaaggcagagagaaagagcuu

SEQ ID NO: 3855 - RNA, 22 nt, Artificial Sequence
  SAMD9L targeting guide sequence portion
uucucucugccuuaaauguggu

SEQ ID NO: 3856 - RNA, 22 nt, Artificial Sequence
  SAMD9L targeting guide sequence portion
uucugaagcucuuucucucugc

SEQ ID NO: 3857 - RNA, 22 nt, Artificial Sequence
  SAMD9L targeting guide sequence portion
uuuaaggcagagagaaagagcu

SEQ ID NO: 3858 - RNA, 22 nt, Artificial Sequence
  SAMD9L targeting guide sequence portion
uuucucucugccuuaaaugugg

SEQ ID NO: 3859 - RNA, 20 nt, Artificial Sequence
  SAMD9L targeting guide sequence portion
aaaauauguaaacaaaacca

SEQ ID NO: 3860 - RNA, 20 nt, Artificial Sequence
  SAMD9L targeting guide sequence portion
aaagauuuugguuuuguuua

SEQ ID NO: 3861 - RNA, 20 nt, Artificial Sequence
  SAMD9L targeting guide sequence portion
aaauauguaaacaaaaccaa

SEQ ID NO: 3862 - RNA, 20 nt, Artificial Sequence
  SAMD9L targeting guide sequence portion
aagauuuugguuuuguuuac

SEQ ID NO: 3863 - RNA, 20 nt, Artificial Sequence
  SAMD9L targeting guide sequence portion
aauauguaaacaaaaccaaa

SEQ ID NO: 3864 - RNA, 20 nt, Artificial Sequence
  SAMD9L targeting guide sequence portion
acagugaaagauuuugguuu

SEQ ID NO: 3865 - RNA, 20 nt, Artificial Sequence
  SAMD9L targeting guide sequence portion
agauuuugguuuuguuuaca

SEQ ID NO: 3866 - RNA, 20 nt, Artificial Sequence
  SAMD9L targeting guide sequence portion
agugaaagauuuugguuuug

SEQ ID NO: 3867 - RNA, 20 nt, Artificial Sequence
  SAMD9L targeting guide sequence portion
auauguaaacaaaaccaaaa

SEQ ID NO: 3868 - RNA, 20 nt, Artificial Sequence
  SAMD9L targeting guide sequence portion
auguaaacaaaaccaaaauc

SEQ ID NO: 3869 - RNA, 20 nt, Artificial Sequence
  SAMD9L targeting guide sequence portion
auuuugguuuuguuuacaua

SEQ ID NO: 3870 - RNA, 20 nt, Artificial Sequence
  SAMD9L targeting guide sequence portion
cagugaaagauuuugguuuu

SEQ ID NO: 3871 - RNA, 20 nt, Artificial Sequence
  SAMD9L targeting guide sequence portion
gaaagauuuugguuuuguuu

SEQ ID NO: 3872 - RNA, 20 nt, Artificial Sequence
  SAMD9L targeting guide sequence portion
gauuuugguuuuguuuacau

SEQ ID NO: 3873 - RNA, 20 nt, Artificial Sequence
  SAMD9L targeting guide sequence portion
gcaaauuuguaaagauaaaa

SEQ ID NO: 3874 - RNA, 20 nt, Artificial Sequence
  SAMD9L targeting guide sequence portion
gguuuuguuuacauauuuua

SEQ ID NO: 3875 - RNA, 20 nt, Artificial Sequence
  SAMD9L targeting guide sequence portion
guaaacaaaaccaaaaucuu

SEQ ID NO: 3876 - RNA, 20 nt, Artificial Sequence
  SAMD9L targeting guide sequence portion
gugaaagauuuugguuuugu

SEQ ID NO: 3877 - RNA, 20 nt, Artificial Sequence
  SAMD9L targeting guide sequence portion
uaaaauauguaaacaaaacc

SEQ ID NO: 3878 - RNA, 20 nt, Artificial Sequence
  SAMD9L targeting guide sequence portion
uaaacaaaaccaaaaucuuu

SEQ ID NO: 3879 - RNA, 20 nt, Artificial Sequence
  SAMD9L targeting guide sequence portion
uauguaaacaaaaccaaaau

SEQ ID NO: 3880 - RNA, 20 nt, Artificial Sequence
  SAMD9L targeting guide sequence portion
ugaaagauuuugguuuuguu

SEQ ID NO: 3881 - RNA, 20 nt, Artificial Sequence
  SAMD9L targeting guide sequence portion
ugcaaauuuguaaagauaaa

SEQ ID NO: 3882 - RNA, 20 nt, Artificial Sequence
  SAMD9L targeting guide sequence portion
ugguuuuguuuacauauuuu

SEQ ID NO: 3883 - RNA, 20 nt, Artificial Sequence
  SAMD9L targeting guide sequence portion
uguaaacaaaaccaaaaucu

SEQ ID NO: 3884 - RNA, 20 nt, Artificial Sequence
  SAMD9L targeting guide sequence portion
uugguuuuguuuacauauuu

SEQ ID NO: 3885 - RNA, 20 nt, Artificial Sequence
  SAMD9L targeting guide sequence portion
uuugguuuuguuuacauauu

SEQ ID NO: 3886 - RNA, 20 nt, Artificial Sequence
  SAMD9L targeting guide sequence portion
uuuugguuuuguuuacauau

SEQ ID NO: 3887 - RNA, 21 nt, Artificial Sequence
  SAMD9L targeting guide sequence portion
aaagauuuugguuuuguuuac

SEQ ID NO: 3888 - RNA, 21 nt, Artificial Sequence
  SAMD9L targeting guide sequence portion
aacagugaaagauuuugguuu

SEQ ID NO: 3889 - RNA, 21 nt, Artificial Sequence
  SAMD9L targeting guide sequence portion
aagauuuugguuuuguuuaca

SEQ ID NO: 3890 - RNA, 21 nt, Artificial Sequence
  SAMD9L targeting guide sequence portion
acagugaaagauuuugguuuu

SEQ ID NO: 3891 - RNA, 21 nt, Artificial Sequence
  SAMD9L targeting guide sequence portion
agauuuugguuuuguuuacau

SEQ ID NO: 3892 - RNA, 21 nt, Artificial Sequence
  SAMD9L targeting guide sequence portion
agugaaagauuuugguuuugu

SEQ ID NO: 3893 - RNA, 21 nt, Artificial Sequence
  SAMD9L targeting guide sequence portion
auguaaacaaaaccaaaaucu

SEQ ID NO: 3894 - RNA, 21 nt, Artificial Sequence
  SAMD9L targeting guide sequence portion
cagugaaagauuuugguuuug

SEQ ID NO: 3895 - RNA, 21 nt, Artificial Sequence
  SAMD9L targeting guide sequence portion
gaaagauuuugguuuuguuua

SEQ ID NO: 3896 - RNA, 21 nt, Artificial Sequence
  SAMD9L targeting guide sequence portion
gauuuugguuuuguuuacaua

SEQ ID NO: 3897 - RNA, 21 nt, Artificial Sequence
  SAMD9L targeting guide sequence portion
guaaacaaaaccaaaaucuuu

SEQ ID NO: 3898 - RNA, 21 nt, Artificial Sequence
  SAMD9L targeting guide sequence portion
gugaaagauuuugguuuuguu

SEQ ID NO: 3899 - RNA, 21 nt, Artificial Sequence
  SAMD9L targeting guide sequence portion
uaaacaaaaccaaaaucuuuc

SEQ ID NO: 3900 - RNA, 21 nt, Artificial Sequence
  SAMD9L targeting guide sequence portion
uauguaaacaaaaccaaaauc

SEQ ID NO: 3901 - RNA, 21 nt, Artificial Sequence
  SAMD9L targeting guide sequence portion
ugaaagauuuugguuuuguuu

SEQ ID NO: 3902 - RNA, 21 nt, Artificial Sequence
  SAMD9L targeting guide sequence portion
uguaaacaaaaccaaaaucuu

SEQ ID NO: 3903 - RNA, 22 nt, Artificial Sequence
  SAMD9L targeting guide sequence portion
aaacagugaaagauuuugguuu

SEQ ID NO: 3904 - RNA, 22 nt, Artificial Sequence
  SAMD9L targeting guide sequence portion
aaagauuuugguuuuguuuaca

SEQ ID NO: 3905 - RNA, 22 nt, Artificial Sequence
  SAMD9L targeting guide sequence portion
aacagugaaagauuuugguuuu

SEQ ID NO: 3906 - RNA, 22 nt, Artificial Sequence
  SAMD9L targeting guide sequence portion
aagauuuugguuuuguuuacau

SEQ ID NO: 3907 - RNA, 22 nt, Artificial Sequence
  SAMD9L targeting guide sequence portion
acagugaaagauuuugguuuug

SEQ ID NO: 3908 - RNA, 22 nt, Artificial Sequence
  SAMD9L targeting guide sequence portion
agauuuugguuuuguuuacaua

SEQ ID NO: 3909 - RNA, 22 nt, Artificial Sequence
  SAMD9L targeting guide sequence portion
agugaaagauuuugguuuuguu

SEQ ID NO: 3910 - RNA, 22 nt, Artificial Sequence
  SAMD9L targeting guide sequence portion
auauguaaacaaaaccaaaauc

SEQ ID NO: 3911 - RNA, 22 nt, Artificial Sequence
  SAMD9L targeting guide sequence portion
auguaaacaaaaccaaaaucuu

SEQ ID NO: 3912 - RNA, 22 nt, Artificial Sequence
  SAMD9L targeting guide sequence portion
cagugaaagauuuugguuuugu

SEQ ID NO: 3913 - RNA, 22 nt, Artificial Sequence
  SAMD9L targeting guide sequence portion
gaaagauuuugguuuuguuuac

SEQ ID NO: 3914 - RNA, 22 nt, Artificial Sequence
  SAMD9L targeting guide sequence portion
gauaaaauauguaaacaaaacc

SEQ ID NO: 3915 - RNA, 22 nt, Artificial Sequence
  SAMD9L targeting guide sequence portion
gaugcaaauuuguaaagauaaa

SEQ ID NO: 3916 - RNA, 22 nt, Artificial Sequence
  SAMD9L targeting guide sequence portion
gauuuugguuuuguuuacauau

SEQ ID NO: 3917 - RNA, 22 nt, Artificial Sequence
  SAMD9L targeting guide sequence portion
gguuuuguuuacauauuuuauc

SEQ ID NO: 3918 - RNA, 22 nt, Artificial Sequence
  SAMD9L targeting guide sequence portion
guaaacaaaaccaaaaucuuuc

SEQ ID NO: 3919 - RNA, 22 nt, Artificial Sequence
  SAMD9L targeting guide sequence portion
gugaaagauuuugguuuuguuu

SEQ ID NO: 3920 - RNA, 22 nt, Artificial Sequence
  SAMD9L targeting guide sequence portion
uaaacaaaaccaaaaucuuuca

SEQ ID NO: 3921 - RNA, 22 nt, Artificial Sequence
  SAMD9L targeting guide sequence portion
uauguaaacaaaaccaaaaucu

SEQ ID NO: 3922 - RNA, 22 nt, Artificial Sequence
  SAMD9L targeting guide sequence portion
ugaaagauuuugguuuuguuua

SEQ ID NO: 3923 - RNA, 22 nt, Artificial Sequence
  SAMD9L targeting guide sequence portion
uguaaacaaaaccaaaaucuuu

SEQ ID NO: 3924 - RNA, 20 nt, Artificial Sequence
  SAMD9L targeting guide sequence portion
aaaauaugcaaacaaaacca

SEQ ID NO: 3925 - RNA, 20 nt, Artificial Sequence
  SAMD9L targeting guide sequence portion
aaagauaaaauaugcaaaca

SEQ ID NO: 3926 - RNA, 20 nt, Artificial Sequence
  SAMD9L targeting guide sequence portion
aaagauuuugguuuuguuug

SEQ ID NO: 3927 - RNA, 20 nt, Artificial Sequence
  SAMD9L targeting guide sequence portion
aaauaugcaaacaaaaccaa

SEQ ID NO: 3928 - RNA, 20 nt, Artificial Sequence
  SAMD9L targeting guide sequence portion
aagauaaaauaugcaaacaa

SEQ ID NO: 3929 - RNA, 20 nt, Artificial Sequence
  SAMD9L targeting guide sequence portion
aagauuuugguuuuguuugc

SEQ ID NO: 3930 - RNA, 20 nt, Artificial Sequence
  SAMD9L targeting guide sequence portion
aauaugcaaacaaaaccaaa

SEQ ID NO: 3931 - RNA, 20 nt, Artificial Sequence
  SAMD9L targeting guide sequence portion
agauaaaauaugcaaacaaa

SEQ ID NO: 3932 - RNA, 20 nt, Artificial Sequence
  SAMD9L targeting guide sequence portion
agauuuugguuuuguuugca

SEQ ID NO: 3933 - RNA, 20 nt, Artificial Sequence
  SAMD9L targeting guide sequence portion
auaaaauaugcaaacaaaac

SEQ ID NO: 3934 - RNA, 20 nt, Artificial Sequence
  SAMD9L targeting guide sequence portion
auaugcaaacaaaaccaaaa

SEQ ID NO: 3935 - RNA, 20 nt, Artificial Sequence
  SAMD9L targeting guide sequence portion
augcaaacaaaaccaaaauc

SEQ ID NO: 3936 - RNA, 20 nt, Artificial Sequence
  SAMD9L targeting guide sequence portion
auuuugguuuuguuugcaua

SEQ ID NO: 3937 - RNA, 20 nt, Artificial Sequence
  SAMD9L targeting guide sequence portion
caaacaaaaccaaaaucuuu

SEQ ID NO: 3938 - RNA, 20 nt, Artificial Sequence
  SAMD9L targeting guide sequence portion
gauaaaauaugcaaacaaaa

SEQ ID NO: 3939 - RNA, 20 nt, Artificial Sequence
  SAMD9L targeting guide sequence portion
gauuuugguuuuguuugcau

SEQ ID NO: 3940 - RNA, 20 nt, Artificial Sequence
  SAMD9L targeting guide sequence portion
gcaaacaaaaccaaaaucuu

SEQ ID NO: 3941 - RNA, 20 nt, Artificial Sequence
  SAMD9L targeting guide sequence portion
gcauauuuuaucuuuacaaa

SEQ ID NO: 3942 - RNA, 20 nt, Artificial Sequence
  SAMD9L targeting guide sequence portion
gguuuuguuugcauauuuua

SEQ ID NO: 3943 - RNA, 20 nt, Artificial Sequence
  SAMD9L targeting guide sequence portion
guaaagauaaaauaugcaaa

SEQ ID NO: 3944 - RNA, 20 nt, Artificial Sequence
  SAMD9L targeting guide sequence portion
guuugcauauuuuaucuuua

SEQ ID NO: 3945 - RNA, 20 nt, Artificial Sequence
  SAMD9L targeting guide sequence portion
guuuuguuugcauauuuuau

SEQ ID NO: 3946 - RNA, 20 nt, Artificial Sequence
  SAMD9L targeting guide sequence portion
uaaaauaugcaaacaaaacc

SEQ ID NO: 3947 - RNA, 20 nt, Artificial Sequence
  SAMD9L targeting guide sequence portion
uaaagauaaaauaugcaaac

SEQ ID NO: 3948 - RNA, 20 nt, Artificial Sequence
  SAMD9L targeting guide sequence portion
uaugcaaacaaaaccaaaau

SEQ ID NO: 3949 - RNA, 20 nt, Artificial Sequence
  SAMD9L targeting guide sequence portion
ugcaaacaaaaccaaaaucu

SEQ ID NO: 3950 - RNA, 20 nt, Artificial Sequence
  SAMD9L targeting guide sequence portion
ugcauauuuuaucuuuacaa

SEQ ID NO: 3951 - RNA, 20 nt, Artificial Sequence
  SAMD9L targeting guide sequence portion
ugguuuuguuugcauauuuu

SEQ ID NO: 3952 - RNA, 20 nt, Artificial Sequence
  SAMD9L targeting guide sequence portion
uguaaagauaaaauaugcaa

SEQ ID NO: 3953 - RNA, 20 nt, Artificial Sequence
  SAMD9L targeting guide sequence portion
uguuugcauauuuuaucuuu

SEQ ID NO: 3954 - RNA, 20 nt, Artificial Sequence
  SAMD9L targeting guide sequence portion
uugcauauuuuaucuuuaca

SEQ ID NO: 3955 - RNA, 20 nt, Artificial Sequence
  SAMD9L targeting guide sequence portion
uugguuuuguuugcauauuu

SEQ ID NO: 3956 - RNA, 20 nt, Artificial Sequence
  SAMD9L targeting guide sequence portion
uuguaaagauaaaauaugca

SEQ ID NO: 3957 - RNA, 20 nt, Artificial Sequence
  SAMD9L targeting guide sequence portion
uuguuugcauauuuuaucuu

SEQ ID NO: 3958 - RNA, 20 nt, Artificial Sequence
  SAMD9L targeting guide sequence portion
uuugcauauuuuaucuuuac

SEQ ID NO: 3959 - RNA, 20 nt, Artificial Sequence
  SAMD9L targeting guide sequence portion
uuugguuuuguuugcauauu

SEQ ID NO: 3960 - RNA, 20 nt, Artificial Sequence
  SAMD9L targeting guide sequence portion
uuuguaaagauaaaauaugc

SEQ ID NO: 3961 - RNA, 20 nt, Artificial Sequence
  SAMD9L targeting guide sequence portion
uuuguuugcauauuuuaucu

SEQ ID NO: 3962 - RNA, 20 nt, Artificial Sequence
  SAMD9L targeting guide sequence portion
uuuugguuuuguuugcauau

SEQ ID NO: 3963 - RNA, 20 nt, Artificial Sequence
  SAMD9L targeting guide sequence portion
uuuuguuugcauauuuuauc

SEQ ID NO: 3964 - RNA, 21 nt, Artificial Sequence
  SAMD9L targeting guide sequence portion
aaaauaugcaaacaaaaccaa

SEQ ID NO: 3965 - RNA, 21 nt, Artificial Sequence
  SAMD9L targeting guide sequence portion
aaagauuuugguuuuguuugc

SEQ ID NO: 3966 - RNA, 21 nt, Artificial Sequence
  SAMD9L targeting guide sequence portion
aaauaugcaaacaaaaccaaa

SEQ ID NO: 3967 - RNA, 21 nt, Artificial Sequence
  SAMD9L targeting guide sequence portion
aagauuuugguuuuguuugca

SEQ ID NO: 3968 - RNA, 21 nt, Artificial Sequence
  SAMD9L targeting guide sequence portion
aauaugcaaacaaaaccaaaa

SEQ ID NO: 3969 - RNA, 21 nt, Artificial Sequence
  SAMD9L targeting guide sequence portion
agauuuugguuuuguuugcau

SEQ ID NO: 3970 - RNA, 21 nt, Artificial Sequence
  SAMD9L targeting guide sequence portion
auaaaauaugcaaacaaaacc

SEQ ID NO: 3971 - RNA, 21 nt, Artificial Sequence
  SAMD9L targeting guide sequence portion
auaugcaaacaaaaccaaaau

SEQ ID NO: 3972 - RNA, 21 nt, Artificial Sequence
  SAMD9L targeting guide sequence portion
augcaaacaaaaccaaaaucu

SEQ ID NO: 3973 - RNA, 21 nt, Artificial Sequence
  SAMD9L targeting guide sequence portion
auuuugguuuuguuugcauau

SEQ ID NO: 3974 - RNA, 21 nt, Artificial Sequence
  SAMD9L targeting guide sequence portion
caaacaaaaccaaaaucuuuc

SEQ ID NO: 3975 - RNA, 21 nt, Artificial Sequence
  SAMD9L targeting guide sequence portion
gaaagauuuugguuuuguuug

SEQ ID NO: 3976 - RNA, 21 nt, Artificial Sequence
  SAMD9L targeting guide sequence portion
gauaaaauaugcaaacaaaac

SEQ ID NO: 3977 - RNA, 21 nt, Artificial Sequence
  SAMD9L targeting guide sequence portion
gauuuugguuuuguuugcaua

SEQ ID NO: 3978 - RNA, 21 nt, Artificial Sequence
  SAMD9L targeting guide sequence portion
gcaaacaaaaccaaaaucuuu

SEQ ID NO: 3979 - RNA, 21 nt, Artificial Sequence
  SAMD9L targeting guide sequence portion
gguuuuguuugcauauuuuau

SEQ ID NO: 3980 - RNA, 21 nt, Artificial Sequence
  SAMD9L targeting guide sequence portion
guaaagauaaaauaugcaaac

SEQ ID NO: 3981 - RNA, 21 nt, Artificial Sequence
  SAMD9L targeting guide sequence portion
guuugcauauuuuaucuuuac

SEQ ID NO: 3982 - RNA, 21 nt, Artificial Sequence
  SAMD9L targeting guide sequence portion
guuuuguuugcauauuuuauc

SEQ ID NO: 3983 - RNA, 21 nt, Artificial Sequence
  SAMD9L targeting guide sequence portion
uaaaauaugcaaacaaaacca

SEQ ID NO: 3984 - RNA, 21 nt, Artificial Sequence
  SAMD9L targeting guide sequence portion
uaugcaaacaaaaccaaaauc

SEQ ID NO: 3985 - RNA, 21 nt, Artificial Sequence
  SAMD9L targeting guide sequence portion
ugcaaacaaaaccaaaaucuu

SEQ ID NO: 3986 - RNA, 21 nt, Artificial Sequence
  SAMD9L targeting guide sequence portion
ugguuuuguuugcauauuuua

SEQ ID NO: 3987 - RNA, 21 nt, Artificial Sequence
  SAMD9L targeting guide sequence portion
uugguuuuguuugcauauuuu

SEQ ID NO: 3988 - RNA, 21 nt, Artificial Sequence
  SAMD9L targeting guide sequence portion
uuugguuuuguuugcauauuu

SEQ ID NO: 3989 - RNA, 21 nt, Artificial Sequence
  SAMD9L targeting guide sequence portion
uuuugguuuuguuugcauauu

SEQ ID NO: 3990 - RNA, 22 nt, Artificial Sequence
  SAMD9L targeting guide sequence portion
aaaauaugcaaacaaaaccaaa

SEQ ID NO: 3991 - RNA, 22 nt, Artificial Sequence
  SAMD9L targeting guide sequence portion
aaagauuuugguuuuguuugca

SEQ ID NO: 3992 - RNA, 22 nt, Artificial Sequence
  SAMD9L targeting guide sequence portion
aaauaugcaaacaaaaccaaaa

SEQ ID NO: 3993 - RNA, 22 nt, Artificial Sequence
  SAMD9L targeting guide sequence portion
aagauuuugguuuuguuugcau

SEQ ID NO: 3994 - RNA, 22 nt, Artificial Sequence
  SAMD9L targeting guide sequence portion
aauaugcaaacaaaaccaaaau

SEQ ID NO: 3995 - RNA, 22 nt, Artificial Sequence
  SAMD9L targeting guide sequence portion
agauaaaauaugcaaacaaaac

SEQ ID NO: 3996 - RNA, 22 nt, Artificial Sequence
  SAMD9L targeting guide sequence portion
agauuuugguuuuguuugcaua

SEQ ID NO: 3997 - RNA, 22 nt, Artificial Sequence
  SAMD9L targeting guide sequence portion
auaaaauaugcaaacaaaacca

SEQ ID NO: 3998 - RNA, 22 nt, Artificial Sequence
  SAMD9L targeting guide sequence portion
auaugcaaacaaaaccaaaauc

SEQ ID NO: 3999 - RNA, 22 nt, Artificial Sequence
  SAMD9L targeting guide sequence portion
augcaaacaaaaccaaaaucuu

SEQ ID NO: 4000 - RNA, 22 nt, Artificial Sequence
  SAMD9L targeting guide sequence portion
auuuugguuuuguuugcauauu

SEQ ID NO: 4001 - RNA, 22 nt, Artificial Sequence
  SAMD9L targeting guide sequence portion
caaacaaaaccaaaaucuuuca

SEQ ID NO: 4002 - RNA, 22 nt, Artificial Sequence
  SAMD9L targeting guide sequence portion
gaaagauuuugguuuuguuugc

SEQ ID NO: 4003 - RNA, 22 nt, Artificial Sequence
  SAMD9L targeting guide sequence portion
gauaaaauaugcaaacaaaacc

SEQ ID NO: 4004 - RNA, 22 nt, Artificial Sequence
  SAMD9L targeting guide sequence portion
gauuuugguuuuguuugcauau

SEQ ID NO: 4005 - RNA, 22 nt, Artificial Sequence
  SAMD9L targeting guide sequence portion
gcaaacaaaaccaaaaucuuuc

SEQ ID NO: 4006 - RNA, 22 nt, Artificial Sequence
  SAMD9L targeting guide sequence portion
gguuuuguuugcauauuuuauc

SEQ ID NO: 4007 - RNA, 22 nt, Artificial Sequence
  SAMD9L targeting guide sequence portion
guaaagauaaaauaugcaaaca

SEQ ID NO: 4008 - RNA, 22 nt, Artificial Sequence
  SAMD9L targeting guide sequence portion
guuugcauauuuuaucuuuaca

SEQ ID NO: 4009 - RNA, 22 nt, Artificial Sequence
  SAMD9L targeting guide sequence portion
guuuuguuugcauauuuuaucu

SEQ ID NO: 4010 - RNA, 22 nt, Artificial Sequence
  SAMD9L targeting guide sequence portion
uaaaauaugcaaacaaaaccaa

SEQ ID NO: 4011 - RNA, 22 nt, Artificial Sequence
  SAMD9L targeting guide sequence portion
uaugcaaacaaaaccaaaaucu

SEQ ID NO: 4012 - RNA, 22 nt, Artificial Sequence
  SAMD9L targeting guide sequence portion
ugaaagauuuugguuuuguuug

SEQ ID NO: 4013 - RNA, 22 nt, Artificial Sequence
  SAMD9L targeting guide sequence portion
ugcaaacaaaaccaaaaucuuu

SEQ ID NO: 4014 - RNA, 22 nt, Artificial Sequence
  SAMD9L targeting guide sequence portion
ugguuuuguuugcauauuuuau

SEQ ID NO: 4015 - RNA, 22 nt, Artificial Sequence
  SAMD9L targeting guide sequence portion
uguaaagauaaaauaugcaaac

SEQ ID NO: 4016 - RNA, 22 nt, Artificial Sequence
  SAMD9L targeting guide sequence portion
uguuugcauauuuuaucuuuac

SEQ ID NO: 4017 - RNA, 22 nt, Artificial Sequence
  SAMD9L targeting guide sequence portion
uugguuuuguuugcauauuuua

SEQ ID NO: 4018 - RNA, 22 nt, Artificial Sequence
  SAMD9L targeting guide sequence portion
uuugguuuuguuugcauauuuu

SEQ ID NO: 4019 - RNA, 22 nt, Artificial Sequence
  SAMD9L targeting guide sequence portion
uuuugguuuuguuugcauauuu

SEQ ID NO: 4020 - RNA, 20 nt, Artificial Sequence
  SAMD9L targeting guide sequence portion
aaacuugcaucugaauguag

SEQ ID NO: 4021 - RNA, 20 nt, Artificial Sequence
  SAMD9L targeting guide sequence portion
aacuugcaucugaauguaga

SEQ ID NO: 4022 - RNA, 20 nt, Artificial Sequence
  SAMD9L targeting guide sequence portion
aaguauuucuacauucagau

SEQ ID NO: 4023 - RNA, 20 nt, Artificial Sequence
  SAMD9L targeting guide sequence portion
acaaacuugcaucugaaugu

SEQ ID NO: 4024 - RNA, 20 nt, Artificial Sequence
  SAMD9L targeting guide sequence portion
acauucagaugcaaguuugu

SEQ ID NO: 4025 - RNA, 20 nt, Artificial Sequence
  SAMD9L targeting guide sequence portion
acuugcaucugaauguagaa

SEQ ID NO: 4026 - RNA, 20 nt, Artificial Sequence
  SAMD9L targeting guide sequence portion
agaugcaaguuuguaaagau

SEQ ID NO: 4027 - RNA, 20 nt, Artificial Sequence
  SAMD9L targeting guide sequence portion
aguauuucuacauucagaug

SEQ ID NO: 4028 - RNA, 20 nt, Artificial Sequence
  SAMD9L targeting guide sequence portion
aucuuuacaaacuugcaucu

SEQ ID NO: 4029 - RNA, 20 nt, Artificial Sequence
  SAMD9L targeting guide sequence portion
augcaaguuuguaaagauaa

SEQ ID NO: 4030 - RNA, 20 nt, Artificial Sequence
  SAMD9L targeting guide sequence portion
auucagaugcaaguuuguaa

SEQ ID NO: 4031 - RNA, 20 nt, Artificial Sequence
  SAMD9L targeting guide sequence portion
auuucuacauucagaugcaa

SEQ ID NO: 4032 - RNA, 20 nt, Artificial Sequence
  SAMD9L targeting guide sequence portion
auuuuaucuuuacaaacuug

SEQ ID NO: 4033 - RNA, 20 nt, Artificial Sequence
  SAMD9L targeting guide sequence portion
caaacuugcaucugaaugua

SEQ ID NO: 4034 - RNA, 20 nt, Artificial Sequence
  SAMD9L targeting guide sequence portion
caaguuuguaaagauaaaau

SEQ ID NO: 4035 - RNA, 20 nt, Artificial Sequence
  SAMD9L targeting guide sequence portion
cagaugcaaguuuguaaaga

SEQ ID NO: 4036 - RNA, 20 nt, Artificial Sequence
  SAMD9L targeting guide sequence portion
cauauuuuaucuuuacaaac

SEQ ID NO: 4037 - RNA, 20 nt, Artificial Sequence
  SAMD9L targeting guide sequence portion
cauucagaugcaaguuugua

SEQ ID NO: 4038 - RNA, 20 nt, Artificial Sequence
  SAMD9L targeting guide sequence portion
ccauauuuuaucuuuacaaa

SEQ ID NO: 4039 - RNA, 20 nt, Artificial Sequence
  SAMD9L targeting guide sequence portion
cuacauucagaugcaaguuu

SEQ ID NO: 4040 - RNA, 20 nt, Artificial Sequence
  SAMD9L targeting guide sequence portion
cuugcaucugaauguagaaa

SEQ ID NO: 4041 - RNA, 20 nt, Artificial Sequence
  SAMD9L targeting guide sequence portion
cuuuacaaacuugcaucuga

SEQ ID NO: 4042 - RNA, 20 nt, Artificial Sequence
  SAMD9L targeting guide sequence portion
gaugcaaguuuguaaagaua

SEQ ID NO: 4043 - RNA, 20 nt, Artificial Sequence
  SAMD9L targeting guide sequence portion
gcaaguuuguaaagauaaaa

SEQ ID NO: 4044 - RNA, 20 nt, Artificial Sequence
  SAMD9L targeting guide sequence portion
guauuucuacauucagaugc

SEQ ID NO: 4045 - RNA, 20 nt, Artificial Sequence
  SAMD9L targeting guide sequence portion
guuuccauauuuuaucuuua

SEQ ID NO: 4046 - RNA, 20 nt, Artificial Sequence
  SAMD9L targeting guide sequence portion
guuuguaaagauaaaauaug

SEQ ID NO: 4047 - RNA, 20 nt, Artificial Sequence
  SAMD9L targeting guide sequence portion
uaaguauuucuacauucaga

SEQ ID NO: 4048 - RNA, 20 nt, Artificial Sequence
  SAMD9L targeting guide sequence portion
uacaaacuugcaucugaaug

SEQ ID NO: 4049 - RNA, 20 nt, Artificial Sequence
  SAMD9L targeting guide sequence portion
uacauucagaugcaaguuug

SEQ ID NO: 4050 - RNA, 20 nt, Artificial Sequence
  SAMD9L targeting guide sequence portion
uaucuuuacaaacuugcauc

SEQ ID NO: 4051 - RNA, 20 nt, Artificial Sequence
  SAMD9L targeting guide sequence portion
uauuucuacauucagaugca

SEQ ID NO: 4052 - RNA, 20 nt, Artificial Sequence
  SAMD9L targeting guide sequence portion
ucagaugcaaguuuguaaag

SEQ ID NO: 4053 - RNA, 20 nt, Artificial Sequence
  SAMD9L targeting guide sequence portion
uccauauuuuaucuuuacaa

SEQ ID NO: 4054 - RNA, 20 nt, Artificial Sequence
  SAMD9L targeting guide sequence portion
ucuacauucagaugcaaguu

SEQ ID NO: 4055 - RNA, 20 nt, Artificial Sequence
  SAMD9L targeting guide sequence portion
ucuuuacaaacuugcaucug

SEQ ID NO: 4056 - RNA, 20 nt, Artificial Sequence
  SAMD9L targeting guide sequence portion
ugcaaguuuguaaagauaaa

SEQ ID NO: 4057 - RNA, 20 nt, Artificial Sequence
  SAMD9L targeting guide sequence portion
uguuuccauauuuuaucuuu

SEQ ID NO: 4058 - RNA, 20 nt, Artificial Sequence
  SAMD9L targeting guide sequence portion
uuacaaacuugcaucugaau

SEQ ID NO: 4059 - RNA, 20 nt, Artificial Sequence
  SAMD9L targeting guide sequence portion
uuaucuuuacaaacuugcau

SEQ ID NO: 4060 - RNA, 20 nt, Artificial Sequence
  SAMD9L targeting guide sequence portion
uucagaugcaaguuuguaaa

SEQ ID NO: 4061 - RNA, 20 nt, Artificial Sequence
  SAMD9L targeting guide sequence portion
uuccauauuuuaucuuuaca

SEQ ID NO: 4062 - RNA, 20 nt, Artificial Sequence
  SAMD9L targeting guide sequence portion
uucuacauucagaugcaagu

SEQ ID NO: 4063 - RNA, 20 nt, Artificial Sequence
  SAMD9L targeting guide sequence portion
uuuacaaacuugcaucugaa

SEQ ID NO: 4064 - RNA, 20 nt, Artificial Sequence
  SAMD9L targeting guide sequence portion
uuuaucuuuacaaacuugca

SEQ ID NO: 4065 - RNA, 20 nt, Artificial Sequence
  SAMD9L targeting guide sequence portion
uuuccauauuuuaucuuuac

SEQ ID NO: 4066 - RNA, 20 nt, Artificial Sequence
  SAMD9L targeting guide sequence portion
uuucuacauucagaugcaag

SEQ ID NO: 4067 - RNA, 20 nt, Artificial Sequence
  SAMD9L targeting guide sequence portion
uuuuaucuuuacaaacuugc

SEQ ID NO: 4068 - RNA, 21 nt, Artificial Sequence
  SAMD9L targeting guide sequence portion
aaacuugcaucugaauguaga

SEQ ID NO: 4069 - RNA, 21 nt, Artificial Sequence
  SAMD9L targeting guide sequence portion
aacuugcaucugaauguagaa

SEQ ID NO: 4070 - RNA, 21 nt, Artificial Sequence
  SAMD9L targeting guide sequence portion
aaguauuucuacauucagaug

SEQ ID NO: 4071 - RNA, 21 nt, Artificial Sequence
  SAMD9L targeting guide sequence portion
acaaacuugcaucugaaugua

SEQ ID NO: 4072 - RNA, 21 nt, Artificial Sequence
  SAMD9L targeting guide sequence portion
acauucagaugcaaguuugua

SEQ ID NO: 4073 - RNA, 21 nt, Artificial Sequence
  SAMD9L targeting guide sequence portion
acuugcaucugaauguagaaa

SEQ ID NO: 4074 - RNA, 21 nt, Artificial Sequence
  SAMD9L targeting guide sequence portion
agaugcaaguuuguaaagaua

SEQ ID NO: 4075 - RNA, 21 nt, Artificial Sequence
  SAMD9L targeting guide sequence portion
aguauuucuacauucagaugc

SEQ ID NO: 4076 - RNA, 21 nt, Artificial Sequence
  SAMD9L targeting guide sequence portion
auaaguauuucuacauucaga

SEQ ID NO: 4077 - RNA, 21 nt, Artificial Sequence
  SAMD9L targeting guide sequence portion
aucuuuacaaacuugcaucug

SEQ ID NO: 4078 - RNA, 21 nt, Artificial Sequence
  SAMD9L targeting guide sequence portion
augcaaguuuguaaagauaaa

SEQ ID NO: 4079 - RNA, 21 nt, Artificial Sequence
  SAMD9L targeting guide sequence portion
auucagaugcaaguuuguaaa

SEQ ID NO: 4080 - RNA, 21 nt, Artificial Sequence
  SAMD9L targeting guide sequence portion
auuucuacauucagaugcaag

SEQ ID NO: 4081 - RNA, 21 nt, Artificial Sequence
  SAMD9L targeting guide sequence portion
auuuuaucuuuacaaacuugc

SEQ ID NO: 4082 - RNA, 21 nt, Artificial Sequence
  SAMD9L targeting guide sequence portion
caaacuugcaucugaauguag

SEQ ID NO: 4083 - RNA, 21 nt, Artificial Sequence
  SAMD9L targeting guide sequence portion
cagaugcaaguuuguaaagau

SEQ ID NO: 4084 - RNA, 21 nt, Artificial Sequence
  SAMD9L targeting guide sequence portion
cauucagaugcaaguuuguaa

SEQ ID NO: 4085 - RNA, 21 nt, Artificial Sequence
  SAMD9L targeting guide sequence portion
ccauauuuuaucuuuacaaac

SEQ ID NO: 4086 - RNA, 21 nt, Artificial Sequence
  SAMD9L targeting guide sequence portion
cuacauucagaugcaaguuug

SEQ ID NO: 4087 - RNA, 21 nt, Artificial Sequence
  SAMD9L targeting guide sequence portion
cuugcaucugaauguagaaau

SEQ ID NO: 4088 - RNA, 21 nt, Artificial Sequence
  SAMD9L targeting guide sequence portion
cuuuacaaacuugcaucugaa

SEQ ID NO: 4089 - RNA, 21 nt, Artificial Sequence
  SAMD9L targeting guide sequence portion
gaugcaaguuuguaaagauaa

SEQ ID NO: 4090 - RNA, 21 nt, Artificial Sequence
  SAMD9L targeting guide sequence portion
gcaaguuuguaaagauaaaau

SEQ ID NO: 4091 - RNA, 21 nt, Artificial Sequence
  SAMD9L targeting guide sequence portion
guauuucuacauucagaugca

SEQ ID NO: 4092 - RNA, 21 nt, Artificial Sequence
  SAMD9L targeting guide sequence portion
guuuccauauuuuaucuuuac

SEQ ID NO: 4093 - RNA, 21 nt, Artificial Sequence
  SAMD9L targeting guide sequence portion
guuuguaaagauaaaauaugg

SEQ ID NO: 4094 - RNA, 21 nt, Artificial Sequence
  SAMD9L targeting guide sequence portion
uaaguauuucuacauucagau

SEQ ID NO: 4095 - RNA, 21 nt, Artificial Sequence
  SAMD9L targeting guide sequence portion
uacaaacuugcaucugaaugu

SEQ ID NO: 4096 - RNA, 21 nt, Artificial Sequence
  SAMD9L targeting guide sequence portion
uacauucagaugcaaguuugu

SEQ ID NO: 4097 - RNA, 21 nt, Artificial Sequence
  SAMD9L targeting guide sequence portion
uaucuuuacaaacuugcaucu

SEQ ID NO: 4098 - RNA, 21 nt, Artificial Sequence
  SAMD9L targeting guide sequence portion
uauuucuacauucagaugcaa

SEQ ID NO: 4099 - RNA, 21 nt, Artificial Sequence
  SAMD9L targeting guide sequence portion
ucagaugcaaguuuguaaaga

SEQ ID NO: 4100 - RNA, 21 nt, Artificial Sequence
  SAMD9L targeting guide sequence portion
ucuacauucagaugcaaguuu

SEQ ID NO: 4101 - RNA, 21 nt, Artificial Sequence
  SAMD9L targeting guide sequence portion
ucuuuacaaacuugcaucuga

SEQ ID NO: 4102 - RNA, 21 nt, Artificial Sequence
  SAMD9L targeting guide sequence portion
ugcaaguuuguaaagauaaaa

SEQ ID NO: 4103 - RNA, 21 nt, Artificial Sequence
  SAMD9L targeting guide sequence portion
uuacaaacuugcaucugaaug

SEQ ID NO: 4104 - RNA, 21 nt, Artificial Sequence
  SAMD9L targeting guide sequence portion
uuaucuuuacaaacuugcauc

SEQ ID NO: 4105 - RNA, 21 nt, Artificial Sequence
  SAMD9L targeting guide sequence portion
uucagaugcaaguuuguaaag

SEQ ID NO: 4106 - RNA, 21 nt, Artificial Sequence
  SAMD9L targeting guide sequence portion
uucuacauucagaugcaaguu

SEQ ID NO: 4107 - RNA, 21 nt, Artificial Sequence
  SAMD9L targeting guide sequence portion
uuuacaaacuugcaucugaau

SEQ ID NO: 4108 - RNA, 21 nt, Artificial Sequence
  SAMD9L targeting guide sequence portion
uuuaucuuuacaaacuugcau

SEQ ID NO: 4109 - RNA, 21 nt, Artificial Sequence
  SAMD9L targeting guide sequence portion
uuucuacauucagaugcaagu

SEQ ID NO: 4110 - RNA, 21 nt, Artificial Sequence
  SAMD9L targeting guide sequence portion
uuuuaucuuuacaaacuugca

SEQ ID NO: 4111 - RNA, 22 nt, Artificial Sequence
  SAMD9L targeting guide sequence portion
aaacuugcaucugaauguagaa

SEQ ID NO: 4112 - RNA, 22 nt, Artificial Sequence
  SAMD9L targeting guide sequence portion
aacuugcaucugaauguagaaa

SEQ ID NO: 4113 - RNA, 22 nt, Artificial Sequence
  SAMD9L targeting guide sequence portion
aaguauuucuacauucagaugc

SEQ ID NO: 4114 - RNA, 22 nt, Artificial Sequence
  SAMD9L targeting guide sequence portion
acaaacuugcaucugaauguag

SEQ ID NO: 4115 - RNA, 22 nt, Artificial Sequence
  SAMD9L targeting guide sequence portion
acauucagaugcaaguuuguaa

SEQ ID NO: 4116 - RNA, 22 nt, Artificial Sequence
  SAMD9L targeting guide sequence portion
acuugcaucugaauguagaaau

SEQ ID NO: 4117 - RNA, 22 nt, Artificial Sequence
  SAMD9L targeting guide sequence portion
agaugcaaguuuguaaagauaa

SEQ ID NO: 4118 - RNA, 22 nt, Artificial Sequence
  SAMD9L targeting guide sequence portion
aguauuucuacauucagaugca

SEQ ID NO: 4119 - RNA, 22 nt, Artificial Sequence
  SAMD9L targeting guide sequence portion
aguuuguaaagauaaaauaugg

SEQ ID NO: 4120 - RNA, 22 nt, Artificial Sequence
  SAMD9L targeting guide sequence portion
auaaguauuucuacauucagau

SEQ ID NO: 4121 - RNA, 22 nt, Artificial Sequence
  SAMD9L targeting guide sequence portion
aucuuuacaaacuugcaucuga

SEQ ID NO: 4122 - RNA, 22 nt, Artificial Sequence
  SAMD9L targeting guide sequence portion
augcaaguuuguaaagauaaaa

SEQ ID NO: 4123 - RNA, 22 nt, Artificial Sequence
  SAMD9L targeting guide sequence portion
auucagaugcaaguuuguaaag

SEQ ID NO: 4124 - RNA, 22 nt, Artificial Sequence
  SAMD9L targeting guide sequence portion
auuucuacauucagaugcaagu

SEQ ID NO: 4125 - RNA, 22 nt, Artificial Sequence
  SAMD9L targeting guide sequence portion
auuuuaucuuuacaaacuugca

SEQ ID NO: 4126 - RNA, 22 nt, Artificial Sequence
  SAMD9L targeting guide sequence portion
caaacuugcaucugaauguaga

SEQ ID NO: 4127 - RNA, 22 nt, Artificial Sequence
  SAMD9L targeting guide sequence portion
cagaugcaaguuuguaaagaua

SEQ ID NO: 4128 - RNA, 22 nt, Artificial Sequence
  SAMD9L targeting guide sequence portion
cauucagaugcaaguuuguaaa

SEQ ID NO: 4129 - RNA, 22 nt, Artificial Sequence
  SAMD9L targeting guide sequence portion
ccauauuuuaucuuuacaaacu

SEQ ID NO: 4130 - RNA, 22 nt, Artificial Sequence
  SAMD9L targeting guide sequence portion
cuacauucagaugcaaguuugu

SEQ ID NO: 4131 - RNA, 22 nt, Artificial Sequence
  SAMD9L targeting guide sequence portion
cuugcaucugaauguagaaaua

SEQ ID NO: 4132 - RNA, 22 nt, Artificial Sequence
  SAMD9L targeting guide sequence portion
cuuuacaaacuugcaucugaau

SEQ ID NO: 4133 - RNA, 22 nt, Artificial Sequence
  SAMD9L targeting guide sequence portion
gauaaguauuucuacauucaga

SEQ ID NO: 4134 - RNA, 22 nt, Artificial Sequence
  SAMD9L targeting guide sequence portion
gaugcaaguuuguaaagauaaa

SEQ ID NO: 4135 - RNA, 22 nt, Artificial Sequence
  SAMD9L targeting guide sequence portion
gcaaguuuguaaagauaaaaua

SEQ ID NO: 4136 - RNA, 22 nt, Artificial Sequence
  SAMD9L targeting guide sequence portion
guauuucuacauucagaugcaa

SEQ ID NO: 4137 - RNA, 22 nt, Artificial Sequence
  SAMD9L targeting guide sequence portion
guuuccauauuuuaucuuuaca

SEQ ID NO: 4138 - RNA, 22 nt, Artificial Sequence
  SAMD9L targeting guide sequence portion
guuuguaaagauaaaauaugga

SEQ ID NO: 4139 - RNA, 22 nt, Artificial Sequence
  SAMD9L targeting guide sequence portion
uaaguauuucuacauucagaug

SEQ ID NO: 4140 - RNA, 22 nt, Artificial Sequence
  SAMD9L targeting guide sequence portion
uacaaacuugcaucugaaugua

SEQ ID NO: 4141 - RNA, 22 nt, Artificial Sequence
  SAMD9L targeting guide sequence portion
uacauucagaugcaaguuugua

SEQ ID NO: 4142 - RNA, 22 nt, Artificial Sequence
  SAMD9L targeting guide sequence portion
uaucuuuacaaacuugcaucug

SEQ ID NO: 4143 - RNA, 22 nt, Artificial Sequence
  SAMD9L targeting guide sequence portion
uauuucuacauucagaugcaag

SEQ ID NO: 4144 - RNA, 22 nt, Artificial Sequence
  SAMD9L targeting guide sequence portion
uauuuuaucuuuacaaacuugc

SEQ ID NO: 4145 - RNA, 22 nt, Artificial Sequence
  SAMD9L targeting guide sequence portion
ucagaugcaaguuuguaaagau

SEQ ID NO: 4146 - RNA, 22 nt, Artificial Sequence
  SAMD9L targeting guide sequence portion
uccauauuuuaucuuuacaaac

SEQ ID NO: 4147 - RNA, 22 nt, Artificial Sequence
  SAMD9L targeting guide sequence portion
ucuacauucagaugcaaguuug

SEQ ID NO: 4148 - RNA, 22 nt, Artificial Sequence
  SAMD9L targeting guide sequence portion
ucuuuacaaacuugcaucugaa

SEQ ID NO: 4149 - RNA, 22 nt, Artificial Sequence
  SAMD9L targeting guide sequence portion
ugcaaguuuguaaagauaaaau

SEQ ID NO: 4150 - RNA, 22 nt, Artificial Sequence
  SAMD9L targeting guide sequence portion
uguuuccauauuuuaucuuuac

SEQ ID NO: 4151 - RNA, 22 nt, Artificial Sequence
  SAMD9L targeting guide sequence portion
uuacaaacuugcaucugaaugu

SEQ ID NO: 4152 - RNA, 22 nt, Artificial Sequence
  SAMD9L targeting guide sequence portion
uuaucuuuacaaacuugcaucu

SEQ ID NO: 4153 - RNA, 22 nt, Artificial Sequence
  SAMD9L targeting guide sequence portion
uucagaugcaaguuuguaaaga

SEQ ID NO: 4154 - RNA, 22 nt, Artificial Sequence
  SAMD9L targeting guide sequence portion
uucuacauucagaugcaaguuu

SEQ ID NO: 4155 - RNA, 22 nt, Artificial Sequence
  SAMD9L targeting guide sequence portion
uuuacaaacuugcaucugaaug

SEQ ID NO: 4156 - RNA, 22 nt, Artificial Sequence
  SAMD9L targeting guide sequence portion
uuuaucuuuacaaacuugcauc

SEQ ID NO: 4157 - RNA, 22 nt, Artificial Sequence
  SAMD9L targeting guide sequence portion
uuucuacauucagaugcaaguu

SEQ ID NO: 4158 - RNA, 22 nt, Artificial Sequence
  SAMD9L targeting guide sequence portion
uuuuaucuuuacaaacuugcau

SEQ ID NO: 4159 - RNA, 20 nt, Artificial Sequence
  SAMD9L targeting guide sequence portion
aaaccccaugcagaaauugu

SEQ ID NO: 4160 - RNA, 20 nt, Artificial Sequence
  SAMD9L targeting guide sequence portion
aacaauuucugcaugggguu

SEQ ID NO: 4161 - RNA, 20 nt, Artificial Sequence
  SAMD9L targeting guide sequence portion
aaccccaugcagaaauuguu

SEQ ID NO: 4162 - RNA, 20 nt, Artificial Sequence
  SAMD9L targeting guide sequence portion
aaggacaaaccccaugcaga

SEQ ID NO: 4163 - RNA, 20 nt, Artificial Sequence
  SAMD9L targeting guide sequence portion
aauuucugcaugggguuugu

SEQ ID NO: 4164 - RNA, 20 nt, Artificial Sequence
  SAMD9L targeting guide sequence portion
acaaaccccaugcagaaauu

SEQ ID NO: 4165 - RNA, 20 nt, Artificial Sequence
  SAMD9L targeting guide sequence portion
acaauuucugcaugggguuu

SEQ ID NO: 4166 - RNA, 20 nt, Artificial Sequence
  SAMD9L targeting guide sequence portion
acaccaacaauuucugcaug

SEQ ID NO: 4167 - RNA, 20 nt, Artificial Sequence
  SAMD9L targeting guide sequence portion
accaacaauuucugcauggg

SEQ ID NO: 4168 - RNA, 20 nt, Artificial Sequence
  SAMD9L targeting guide sequence portion
accccaugcagaaauuguug

SEQ ID NO: 4169 - RNA, 20 nt, Artificial Sequence
  SAMD9L targeting guide sequence portion
aggacaaaccccaugcagaa

SEQ ID NO: 4170 - RNA, 20 nt, Artificial Sequence
  SAMD9L targeting guide sequence portion
agucaaggacaaaccccaug

SEQ ID NO: 4171 - RNA, 20 nt, Artificial Sequence
  SAMD9L targeting guide sequence portion
augcagaaauuguuggugug

SEQ ID NO: 4172 - RNA, 20 nt, Artificial Sequence
  SAMD9L targeting guide sequence portion
auuucugcaugggguuuguc

SEQ ID NO: 4173 - RNA, 20 nt, Artificial Sequence
  SAMD9L targeting guide sequence portion
auuuucacaccaacaauuuc

SEQ ID NO: 4174 - RNA, 20 nt, Artificial Sequence
  SAMD9L targeting guide sequence portion
caaaccccaugcagaaauug

SEQ ID NO: 4175 - RNA, 20 nt, Artificial Sequence
  SAMD9L targeting guide sequence portion
caacaauuucugcauggggu

SEQ ID NO: 4176 - RNA, 20 nt, Artificial Sequence
  SAMD9L targeting guide sequence portion
caaggacaaaccccaugcag

SEQ ID NO: 4177 - RNA, 20 nt, Artificial Sequence
  SAMD9L targeting guide sequence portion
caauuucugcaugggguuug

SEQ ID NO: 4178 - RNA, 20 nt, Artificial Sequence
  SAMD9L targeting guide sequence portion
cacaccaacaauuucugcau

SEQ ID NO: 4179 - RNA, 20 nt, Artificial Sequence
  SAMD9L targeting guide sequence portion
caccaacaauuucugcaugg

SEQ ID NO: 4180 - RNA, 20 nt, Artificial Sequence
  SAMD9L targeting guide sequence portion
cagaaauuguuggugugaaa

SEQ ID NO: 4181 - RNA, 20 nt, Artificial Sequence
  SAMD9L targeting guide sequence portion
caugcagaaauuguuggugu

SEQ ID NO: 4182 - RNA, 20 nt, Artificial Sequence
  SAMD9L targeting guide sequence portion
ccaacaauuucugcaugggg

SEQ ID NO: 4183 - RNA, 20 nt, Artificial Sequence
  SAMD9L targeting guide sequence portion
ccaugcagaaauuguuggug

SEQ ID NO: 4184 - RNA, 20 nt, Artificial Sequence
  SAMD9L targeting guide sequence portion
cccaugcagaaauuguuggu

SEQ ID NO: 4185 - RNA, 20 nt, Artificial Sequence
  SAMD9L targeting guide sequence portion
ccccaugcagaaauuguugg

SEQ ID NO: 4186 - RNA, 20 nt, Artificial Sequence
  SAMD9L targeting guide sequence portion
cugcaugggguuuguccuug

SEQ ID NO: 4187 - RNA, 20 nt, Artificial Sequence
  SAMD9L targeting guide sequence portion
gacaaaccccaugcagaaau

SEQ ID NO: 4188 - RNA, 20 nt, Artificial Sequence
  SAMD9L targeting guide sequence portion
gagucaaggacaaaccccau

SEQ ID NO: 4189 - RNA, 20 nt, Artificial Sequence
  SAMD9L targeting guide sequence portion
gauuuucacaccaacaauuu

SEQ ID NO: 4190 - RNA, 20 nt, Artificial Sequence
  SAMD9L targeting guide sequence portion
gcagaaauuguuggugugaa

SEQ ID NO: 4191 - RNA, 20 nt, Artificial Sequence
  SAMD9L targeting guide sequence portion
gcaugggguuuguccuugac

SEQ ID NO: 4192 - RNA, 20 nt, Artificial Sequence
  SAMD9L targeting guide sequence portion
ggacaaaccccaugcagaaa

SEQ ID NO: 4193 - RNA, 20 nt, Artificial Sequence
  SAMD9L targeting guide sequence portion
ggagucaaggacaaacccca

SEQ ID NO: 4194 - RNA, 20 nt, Artificial Sequence
  SAMD9L targeting guide sequence portion
ggugauuuucacaccaacaa

SEQ ID NO: 4195 - RNA, 20 nt, Artificial Sequence
  SAMD9L targeting guide sequence portion
gucaaggacaaaccccaugc

SEQ ID NO: 4196 - RNA, 20 nt, Artificial Sequence
  SAMD9L targeting guide sequence portion
gugauuuucacaccaacaau

SEQ ID NO: 4197 - RNA, 20 nt, Artificial Sequence
  SAMD9L targeting guide sequence portion
ucaaggacaaaccccaugca

SEQ ID NO: 4198 - RNA, 20 nt, Artificial Sequence
  SAMD9L targeting guide sequence portion
ucacaccaacaauuucugca

SEQ ID NO: 4199 - RNA, 20 nt, Artificial Sequence
  SAMD9L targeting guide sequence portion
ucugcaugggguuuguccuu

SEQ ID NO: 4200 - RNA, 20 nt, Artificial Sequence
  SAMD9L targeting guide sequence portion
ugauuuucacaccaacaauu

SEQ ID NO: 4201 - RNA, 20 nt, Artificial Sequence
  SAMD9L targeting guide sequence portion
ugcagaaauuguugguguga

SEQ ID NO: 4202 - RNA, 20 nt, Artificial Sequence
  SAMD9L targeting guide sequence portion
ugcaugggguuuguccuuga

SEQ ID NO: 4203 - RNA, 20 nt, Artificial Sequence
  SAMD9L targeting guide sequence portion
uggagucaaggacaaacccc

SEQ ID NO: 4204 - RNA, 20 nt, Artificial Sequence
  SAMD9L targeting guide sequence portion
uucacaccaacaauuucugc

SEQ ID NO: 4205 - RNA, 20 nt, Artificial Sequence
  SAMD9L targeting guide sequence portion
uucugcaugggguuuguccu

SEQ ID NO: 4206 - RNA, 20 nt, Artificial Sequence
  SAMD9L targeting guide sequence portion
uuggagucaaggacaaaccc

SEQ ID NO: 4207 - RNA, 20 nt, Artificial Sequence
  SAMD9L targeting guide sequence portion
uuucacaccaacaauuucug

SEQ ID NO: 4208 - RNA, 20 nt, Artificial Sequence
  SAMD9L targeting guide sequence portion
uuucugcaugggguuugucc

SEQ ID NO: 4209 - RNA, 20 nt, Artificial Sequence
  SAMD9L targeting guide sequence portion
uuuggagucaaggacaaacc

SEQ ID NO: 4210 - RNA, 20 nt, Artificial Sequence
  SAMD9L targeting guide sequence portion
uuuucacaccaacaauuucu

SEQ ID NO: 4211 - RNA, 21 nt, Artificial Sequence
  SAMD9L targeting guide sequence portion
aaaccccaugcagaaauuguu

SEQ ID NO: 4212 - RNA, 21 nt, Artificial Sequence
  SAMD9L targeting guide sequence portion
aacaauuucugcaugggguuu

SEQ ID NO: 4213 - RNA, 21 nt, Artificial Sequence
  SAMD9L targeting guide sequence portion
aaccccaugcagaaauuguug

SEQ ID NO: 4214 - RNA, 21 nt, Artificial Sequence
  SAMD9L targeting guide sequence portion
aaggacaaaccccaugcagaa

SEQ ID NO: 4215 - RNA, 21 nt, Artificial Sequence
  SAMD9L targeting guide sequence portion
aauuucugcaugggguuuguc

SEQ ID NO: 4216 - RNA, 21 nt, Artificial Sequence
  SAMD9L targeting guide sequence portion
acaaaccccaugcagaaauug

SEQ ID NO: 4217 - RNA, 21 nt, Artificial Sequence
  SAMD9L targeting guide sequence portion
acaauuucugcaugggguuug

SEQ ID NO: 4218 - RNA, 21 nt, Artificial Sequence
  SAMD9L targeting guide sequence portion
acaccaacaauuucugcaugg

SEQ ID NO: 4219 - RNA, 21 nt, Artificial Sequence
  SAMD9L targeting guide sequence portion
accaacaauuucugcaugggg

SEQ ID NO: 4220 - RNA, 21 nt, Artificial Sequence
  SAMD9L targeting guide sequence portion
accccaugcagaaauuguugg

SEQ ID NO: 4221 - RNA, 21 nt, Artificial Sequence
  SAMD9L targeting guide sequence portion
aggacaaaccccaugcagaaa

SEQ ID NO: 4222 - RNA, 21 nt, Artificial Sequence
  SAMD9L targeting guide sequence portion
agucaaggacaaaccccaugc

SEQ ID NO: 4223 - RNA, 21 nt, Artificial Sequence
  SAMD9L targeting guide sequence portion
augcagaaauuguugguguga

SEQ ID NO: 4224 - RNA, 21 nt, Artificial Sequence
  SAMD9L targeting guide sequence portion
auuucugcaugggguuugucc

SEQ ID NO: 4225 - RNA, 21 nt, Artificial Sequence
  SAMD9L targeting guide sequence portion
auuuucacaccaacaauuucu

SEQ ID NO: 4226 - RNA, 21 nt, Artificial Sequence
  SAMD9L targeting guide sequence portion
caaaccccaugcagaaauugu

SEQ ID NO: 4227 - RNA, 21 nt, Artificial Sequence
  SAMD9L targeting guide sequence portion
caacaauuucugcaugggguu

SEQ ID NO: 4228 - RNA, 21 nt, Artificial Sequence
  SAMD9L targeting guide sequence portion
caaggacaaaccccaugcaga

SEQ ID NO: 4229 - RNA, 21 nt, Artificial Sequence
  SAMD9L targeting guide sequence portion
caauuucugcaugggguuugu

SEQ ID NO: 4230 - RNA, 21 nt, Artificial Sequence
  SAMD9L targeting guide sequence portion
cacaccaacaauuucugcaug

SEQ ID NO: 4231 - RNA, 21 nt, Artificial Sequence
  SAMD9L targeting guide sequence portion
caccaacaauuucugcauggg

SEQ ID NO: 4232 - RNA, 21 nt, Artificial Sequence
  SAMD9L targeting guide sequence portion
cagaaauuguuggugugaaaa

SEQ ID NO: 4233 - RNA, 21 nt, Artificial Sequence
  SAMD9L targeting guide sequence portion
caugcagaaauuguuggugug

SEQ ID NO: 4234 - RNA, 21 nt, Artificial Sequence
  SAMD9L targeting guide sequence portion
ccaacaauuucugcauggggu

SEQ ID NO: 4235 - RNA, 21 nt, Artificial Sequence
  SAMD9L targeting guide sequence portion
ccaugcagaaauuguuggugu

SEQ ID NO: 4236 - RNA, 21 nt, Artificial Sequence
  SAMD9L targeting guide sequence portion
cccaugcagaaauuguuggug

SEQ ID NO: 4237 - RNA, 21 nt, Artificial Sequence
  SAMD9L targeting guide sequence portion
ccccaugcagaaauuguuggu

SEQ ID NO: 4238 - RNA, 21 nt, Artificial Sequence
  SAMD9L targeting guide sequence portion
cugcaugggguuuguccuuga

SEQ ID NO: 4239 - RNA, 21 nt, Artificial Sequence
  SAMD9L targeting guide sequence portion
gacaaaccccaugcagaaauu

SEQ ID NO: 4240 - RNA, 21 nt, Artificial Sequence
  SAMD9L targeting guide sequence portion
gagucaaggacaaaccccaug

SEQ ID NO: 4241 - RNA, 21 nt, Artificial Sequence
  SAMD9L targeting guide sequence portion
gauuuucacaccaacaauuuc

SEQ ID NO: 4242 - RNA, 21 nt, Artificial Sequence
  SAMD9L targeting guide sequence portion
gcagaaauuguuggugugaaa

SEQ ID NO: 4243 - RNA, 21 nt, Artificial Sequence
  SAMD9L targeting guide sequence portion
gcaugggguuuguccuugacu

SEQ ID NO: 4244 - RNA, 21 nt, Artificial Sequence
  SAMD9L targeting guide sequence portion
ggacaaaccccaugcagaaau

SEQ ID NO: 4245 - RNA, 21 nt, Artificial Sequence
  SAMD9L targeting guide sequence portion
ggagucaaggacaaaccccau

SEQ ID NO: 4246 - RNA, 21 nt, Artificial Sequence
  SAMD9L targeting guide sequence portion
ggugauuuucacaccaacaau

SEQ ID NO: 4247 - RNA, 21 nt, Artificial Sequence
  SAMD9L targeting guide sequence portion
gucaaggacaaaccccaugca

SEQ ID NO: 4248 - RNA, 21 nt, Artificial Sequence
  SAMD9L targeting guide sequence portion
gugauuuucacaccaacaauu

SEQ ID NO: 4249 - RNA, 21 nt, Artificial Sequence
  SAMD9L targeting guide sequence portion
ucaaggacaaaccccaugcag

SEQ ID NO: 4250 - RNA, 21 nt, Artificial Sequence
  SAMD9L targeting guide sequence portion
ucacaccaacaauuucugcau

SEQ ID NO: 4251 - RNA, 21 nt, Artificial Sequence
  SAMD9L targeting guide sequence portion
ucugcaugggguuuguccuug

SEQ ID NO: 4252 - RNA, 21 nt, Artificial Sequence
  SAMD9L targeting guide sequence portion
ugauuuucacaccaacaauuu

SEQ ID NO: 4253 - RNA, 21 nt, Artificial Sequence
  SAMD9L targeting guide sequence portion
ugcagaaauuguuggugugaa

SEQ ID NO: 4254 - RNA, 21 nt, Artificial Sequence
  SAMD9L targeting guide sequence portion
ugcaugggguuuguccuugac

SEQ ID NO: 4255 - RNA, 21 nt, Artificial Sequence
  SAMD9L targeting guide sequence portion
uggagucaaggacaaacccca

SEQ ID NO: 4256 - RNA, 21 nt, Artificial Sequence
  SAMD9L targeting guide sequence portion
uggugauuuucacaccaacaa

SEQ ID NO: 4257 - RNA, 21 nt, Artificial Sequence
  SAMD9L targeting guide sequence portion
uucacaccaacaauuucugca

SEQ ID NO: 4258 - RNA, 21 nt, Artificial Sequence
  SAMD9L targeting guide sequence portion
uucugcaugggguuuguccuu

SEQ ID NO: 4259 - RNA, 21 nt, Artificial Sequence
  SAMD9L targeting guide sequence portion
uuggagucaaggacaaacccc

SEQ ID NO: 4260 - RNA, 21 nt, Artificial Sequence
  SAMD9L targeting guide sequence portion
uuucacaccaacaauuucugc

SEQ ID NO: 4261 - RNA, 21 nt, Artificial Sequence
  SAMD9L targeting guide sequence portion
uuucugcaugggguuuguccu

SEQ ID NO: 4262 - RNA, 21 nt, Artificial Sequence
  SAMD9L targeting guide sequence portion
uuuggagucaaggacaaaccc

SEQ ID NO: 4263 - RNA, 21 nt, Artificial Sequence
  SAMD9L targeting guide sequence portion
uuuucacaccaacaauuucug

SEQ ID NO: 4264 - RNA, 21 nt, Artificial Sequence
  SAMD9L targeting guide sequence portion
uuuuggagucaaggacaaacc

SEQ ID NO: 4265 - RNA, 22 nt, Artificial Sequence
  SAMD9L targeting guide sequence portion
aaaccccaugcagaaauuguug

SEQ ID NO: 4266 - RNA, 22 nt, Artificial Sequence
  SAMD9L targeting guide sequence portion
aacaauuucugcaugggguuug

SEQ ID NO: 4267 - RNA, 22 nt, Artificial Sequence
  SAMD9L targeting guide sequence portion
aaccccaugcagaaauuguugg

SEQ ID NO: 4268 - RNA, 22 nt, Artificial Sequence
  SAMD9L targeting guide sequence portion
aaggacaaaccccaugcagaaa

SEQ ID NO: 4269 - RNA, 22 nt, Artificial Sequence
  SAMD9L targeting guide sequence portion
aauuucugcaugggguuugucc

SEQ ID NO: 4270 - RNA, 22 nt, Artificial Sequence
  SAMD9L targeting guide sequence portion
acaaaccccaugcagaaauugu

SEQ ID NO: 4271 - RNA, 22 nt, Artificial Sequence
  SAMD9L targeting guide sequence portion
acaauuucugcaugggguuugu

SEQ ID NO: 4272 - RNA, 22 nt, Artificial Sequence
  SAMD9L targeting guide sequence portion
acaccaacaauuucugcauggg

SEQ ID NO: 4273 - RNA, 22 nt, Artificial Sequence
  SAMD9L targeting guide sequence portion
accaacaauuucugcauggggu

SEQ ID NO: 4274 - RNA, 22 nt, Artificial Sequence
  SAMD9L targeting guide sequence portion
accccaugcagaaauuguuggu

SEQ ID NO: 4275 - RNA, 22 nt, Artificial Sequence
  SAMD9L targeting guide sequence portion
aggacaaaccccaugcagaaau

SEQ ID NO: 4276 - RNA, 22 nt, Artificial Sequence
  SAMD9L targeting guide sequence portion
agucaaggacaaaccccaugca

SEQ ID NO: 4277 - RNA, 22 nt, Artificial Sequence
  SAMD9L targeting guide sequence portion
augcagaaauuguuggugugaa

SEQ ID NO: 4278 - RNA, 22 nt, Artificial Sequence
  SAMD9L targeting guide sequence portion
auuucugcaugggguuuguccu

SEQ ID NO: 4279 - RNA, 22 nt, Artificial Sequence
  SAMD9L targeting guide sequence portion
auuuucacaccaacaauuucug

SEQ ID NO: 4280 - RNA, 22 nt, Artificial Sequence
  SAMD9L targeting guide sequence portion
auuuuggagucaaggacaaacc

SEQ ID NO: 4281 - RNA, 22 nt, Artificial Sequence
  SAMD9L targeting guide sequence portion
caaaccccaugcagaaauuguu

SEQ ID NO: 4282 - RNA, 22 nt, Artificial Sequence
  SAMD9L targeting guide sequence portion
caacaauuucugcaugggguuu

SEQ ID NO: 4283 - RNA, 22 nt, Artificial Sequence
  SAMD9L targeting guide sequence portion
caaggacaaaccccaugcagaa

SEQ ID NO: 4284 - RNA, 22 nt, Artificial Sequence
  SAMD9L targeting guide sequence portion
caauuucugcaugggguuuguc

SEQ ID NO: 4285 - RNA, 22 nt, Artificial Sequence
  SAMD9L targeting guide sequence portion
cacaccaacaauuucugcaugg

SEQ ID NO: 4286 - RNA, 22 nt, Artificial Sequence
  SAMD9L targeting guide sequence portion
caccaacaauuucugcaugggg

SEQ ID NO: 4287 - RNA, 22 nt, Artificial Sequence
  SAMD9L targeting guide sequence portion
cagaaauuguuggugugaaaau

SEQ ID NO: 4288 - RNA, 22 nt, Artificial Sequence
  SAMD9L targeting guide sequence portion
caugcagaaauuguugguguga

SEQ ID NO: 4289 - RNA, 22 nt, Artificial Sequence
  SAMD9L targeting guide sequence portion
ccaacaauuucugcaugggguu

SEQ ID NO: 4290 - RNA, 22 nt, Artificial Sequence
  SAMD9L targeting guide sequence portion
ccaugcagaaauuguuggugug

SEQ ID NO: 4291 - RNA, 22 nt, Artificial Sequence
  SAMD9L targeting guide sequence portion
cccaugcagaaauuguuggugu

SEQ ID NO: 4292 - RNA, 22 nt, Artificial Sequence
  SAMD9L targeting guide sequence portion
ccccaugcagaaauuguuggug

SEQ ID NO: 4293 - RNA, 22 nt, Artificial Sequence
  SAMD9L targeting guide sequence portion
cugcaugggguuuguccuugac

SEQ ID NO: 4294 - RNA, 22 nt, Artificial Sequence
  SAMD9L targeting guide sequence portion
cuggugauuuucacaccaacaa

SEQ ID NO: 4295 - RNA, 22 nt, Artificial Sequence
  SAMD9L targeting guide sequence portion
gacaaaccccaugcagaaauug

SEQ ID NO: 4296 - RNA, 22 nt, Artificial Sequence
  SAMD9L targeting guide sequence portion
gagucaaggacaaaccccaugc

SEQ ID NO: 4297 - RNA, 22 nt, Artificial Sequence
  SAMD9L targeting guide sequence portion
gauuuucacaccaacaauuucu

SEQ ID NO: 4298 - RNA, 22 nt, Artificial Sequence
  SAMD9L targeting guide sequence portion
gcagaaauuguuggugugaaaa

SEQ ID NO: 4299 - RNA, 22 nt, Artificial Sequence
  SAMD9L targeting guide sequence portion
gcaugggguuuguccuugacuc

SEQ ID NO: 4300 - RNA, 22 nt, Artificial Sequence
  SAMD9L targeting guide sequence portion
ggacaaaccccaugcagaaauu

SEQ ID NO: 4301 - RNA, 22 nt, Artificial Sequence
  SAMD9L targeting guide sequence portion
ggagucaaggacaaaccccaug

SEQ ID NO: 4302 - RNA, 22 nt, Artificial Sequence
  SAMD9L targeting guide sequence portion
ggugauuuucacaccaacaauu

SEQ ID NO: 4303 - RNA, 22 nt, Artificial Sequence
  SAMD9L targeting guide sequence portion
gucaaggacaaaccccaugcag

SEQ ID NO: 4304 - RNA, 22 nt, Artificial Sequence
  SAMD9L targeting guide sequence portion
gugauuuucacaccaacaauuu

SEQ ID NO: 4305 - RNA, 22 nt, Artificial Sequence
  SAMD9L targeting guide sequence portion
ucaaggacaaaccccaugcaga

SEQ ID NO: 4306 - RNA, 22 nt, Artificial Sequence
  SAMD9L targeting guide sequence portion
ucacaccaacaauuucugcaug

SEQ ID NO: 4307 - RNA, 22 nt, Artificial Sequence
  SAMD9L targeting guide sequence portion
ucugcaugggguuuguccuuga

SEQ ID NO: 4308 - RNA, 22 nt, Artificial Sequence
  SAMD9L targeting guide sequence portion
ugauuuucacaccaacaauuuc

SEQ ID NO: 4309 - RNA, 22 nt, Artificial Sequence
  SAMD9L targeting guide sequence portion
ugcagaaauuguuggugugaaa

SEQ ID NO: 4310 - RNA, 22 nt, Artificial Sequence
  SAMD9L targeting guide sequence portion
ugcaugggguuuguccuugacu

SEQ ID NO: 4311 - RNA, 22 nt, Artificial Sequence
  SAMD9L targeting guide sequence portion
uggagucaaggacaaaccccau

SEQ ID NO: 4312 - RNA, 22 nt, Artificial Sequence
  SAMD9L targeting guide sequence portion
uggugauuuucacaccaacaau

SEQ ID NO: 4313 - RNA, 22 nt, Artificial Sequence
  SAMD9L targeting guide sequence portion
uucacaccaacaauuucugcau

SEQ ID NO: 4314 - RNA, 22 nt, Artificial Sequence
  SAMD9L targeting guide sequence portion
uucugcaugggguuuguccuug

SEQ ID NO: 4315 - RNA, 22 nt, Artificial Sequence
  SAMD9L targeting guide sequence portion
uuggagucaaggacaaacccca

SEQ ID NO: 4316 - RNA, 22 nt, Artificial Sequence
  SAMD9L targeting guide sequence portion
uuucacaccaacaauuucugca

SEQ ID NO: 4317 - RNA, 22 nt, Artificial Sequence
  SAMD9L targeting guide sequence portion
uuucugcaugggguuuguccuu

SEQ ID NO: 4318 - RNA, 22 nt, Artificial Sequence
  SAMD9L targeting guide sequence portion
uuuggagucaaggacaaacccc

SEQ ID NO: 4319 - RNA, 22 nt, Artificial Sequence
  SAMD9L targeting guide sequence portion
uuuucacaccaacaauuucugc

SEQ ID NO: 4320 - RNA, 22 nt, Artificial Sequence
  SAMD9L targeting guide sequence portion
uuuuggagucaaggacaaaccc

SEQ ID NO: 4321 - RNA, 20 nt, Artificial Sequence
  SAMD9L targeting guide sequence portion
aaaauggaugguggaauugg

SEQ ID NO: 4322 - RNA, 20 nt, Artificial Sequence
  SAMD9L targeting guide sequence portion
aaauggaugguggaauuggu

SEQ ID NO: 4323 - RNA, 20 nt, Artificial Sequence
  SAMD9L targeting guide sequence portion
aauggaugguggaauuggug

SEQ ID NO: 4324 - RNA, 20 nt, Artificial Sequence
  SAMD9L targeting guide sequence portion
aauucacgcaccaauuccac

SEQ ID NO: 4325 - RNA, 20 nt, Artificial Sequence
  SAMD9L targeting guide sequence portion
aauuccaccauccauuuugg

SEQ ID NO: 4326 - RNA, 20 nt, Artificial Sequence
  SAMD9L targeting guide sequence portion
accaauuccaccauccauuu

SEQ ID NO: 4327 - RNA, 20 nt, Artificial Sequence
  SAMD9L targeting guide sequence portion
acgcaccaauuccaccaucc

SEQ ID NO: 4328 - RNA, 20 nt, Artificial Sequence
  SAMD9L targeting guide sequence portion
acuccaaaauggauggugga

SEQ ID NO: 4329 - RNA, 20 nt, Artificial Sequence
  SAMD9L targeting guide sequence portion
augaauucacgcaccaauuc

SEQ ID NO: 4330 - RNA, 20 nt, Artificial Sequence
  SAMD9L targeting guide sequence portion
auggaugguggaauuggugc

SEQ ID NO: 4331 - RNA, 20 nt, Artificial Sequence
  SAMD9L targeting guide sequence portion
augguggaauuggugcguga

SEQ ID NO: 4332 - RNA, 20 nt, Artificial Sequence
  SAMD9L targeting guide sequence portion
auucacgcaccaauuccacc

SEQ ID NO: 4333 - RNA, 20 nt, Artificial Sequence
  SAMD9L targeting guide sequence portion
auuccaccauccauuuugga

SEQ ID NO: 4334 - RNA, 20 nt, Artificial Sequence
  SAMD9L targeting guide sequence portion
caaaauggaugguggaauug

SEQ ID NO: 4335 - RNA, 20 nt, Artificial Sequence
  SAMD9L targeting guide sequence portion
caauuccaccauccauuuug

SEQ ID NO: 4336 - RNA, 20 nt, Artificial Sequence
  SAMD9L targeting guide sequence portion
caccaauuccaccauccauu

SEQ ID NO: 4337 - RNA, 20 nt, Artificial Sequence
  SAMD9L targeting guide sequence portion
cacgcaccaauuccaccauc

SEQ ID NO: 4338 - RNA, 20 nt, Artificial Sequence
  SAMD9L targeting guide sequence portion
ccaaaauggaugguggaauu

SEQ ID NO: 4339 - RNA, 20 nt, Artificial Sequence
  SAMD9L targeting guide sequence portion
ccaauuccaccauccauuuu

SEQ ID NO: 4340 - RNA, 20 nt, Artificial Sequence
  SAMD9L targeting guide sequence portion
ccaccauccauuuuggaguc

SEQ ID NO: 4341 - RNA, 20 nt, Artificial Sequence
  SAMD9L targeting guide sequence portion
ccuugacuccaaaauggaug

SEQ ID NO: 4342 - RNA, 20 nt, Artificial Sequence
  SAMD9L targeting guide sequence portion
cgcaccaauuccaccaucca

SEQ ID NO: 4343 - RNA, 20 nt, Artificial Sequence
  SAMD9L targeting guide sequence portion
cuccaaaauggaugguggaa

SEQ ID NO: 4344 - RNA, 20 nt, Artificial Sequence
  SAMD9L targeting guide sequence portion
cuugacuccaaaauggaugg

SEQ ID NO: 4345 - RNA, 20 nt, Artificial Sequence
  SAMD9L targeting guide sequence portion
cuuguaugaauucacgcacc

SEQ ID NO: 4346 - RNA, 20 nt, Artificial Sequence
  SAMD9L targeting guide sequence portion
gaauucacgcaccaauucca

SEQ ID NO: 4347 - RNA, 20 nt, Artificial Sequence
  SAMD9L targeting guide sequence portion
gaauuggugcgugaauucau

SEQ ID NO: 4348 - RNA, 20 nt, Artificial Sequence
  SAMD9L targeting guide sequence portion
gacuccaaaauggauggugg

SEQ ID NO: 4349 - RNA, 20 nt, Artificial Sequence
  SAMD9L targeting guide sequence portion
gaugguggaauuggugcgug

SEQ ID NO: 4350 - RNA, 20 nt, Artificial Sequence
  SAMD9L targeting guide sequence portion
gcaccaauuccaccauccau

SEQ ID NO: 4351 - RNA, 20 nt, Artificial Sequence
  SAMD9L targeting guide sequence portion
gcuuguaugaauucacgcac

SEQ ID NO: 4352 - RNA, 20 nt, Artificial Sequence
  SAMD9L targeting guide sequence portion
ggaauuggugcgugaauuca

SEQ ID NO: 4353 - RNA, 20 nt, Artificial Sequence
  SAMD9L targeting guide sequence portion
ggaugguggaauuggugcgu

SEQ ID NO: 4354 - RNA, 20 nt, Artificial Sequence
  SAMD9L targeting guide sequence portion
gguggaauuggugcgugaau

SEQ ID NO: 4355 - RNA, 20 nt, Artificial Sequence
  SAMD9L targeting guide sequence portion
guaugaauucacgcaccaau

SEQ ID NO: 4356 - RNA, 20 nt, Artificial Sequence
  SAMD9L targeting guide sequence portion
guccuugacuccaaaaugga

SEQ ID NO: 4357 - RNA, 20 nt, Artificial Sequence
  SAMD9L targeting guide sequence portion
guggaauuggugcgugaauu

SEQ ID NO: 4358 - RNA, 20 nt, Artificial Sequence
  SAMD9L targeting guide sequence portion
uaugaauucacgcaccaauu

SEQ ID NO: 4359 - RNA, 20 nt, Artificial Sequence
  SAMD9L targeting guide sequence portion
ucacgcaccaauuccaccau

SEQ ID NO: 4360 - RNA, 20 nt, Artificial Sequence
  SAMD9L targeting guide sequence portion
uccaaaauggaugguggaau

SEQ ID NO: 4361 - RNA, 20 nt, Artificial Sequence
  SAMD9L targeting guide sequence portion
uccaccauccauuuuggagu

SEQ ID NO: 4362 - RNA, 20 nt, Artificial Sequence
  SAMD9L targeting guide sequence portion
uccuugacuccaaaauggau

SEQ ID NO: 4363 - RNA, 20 nt, Artificial Sequence
  SAMD9L targeting guide sequence portion
ugaauucacgcaccaauucc

SEQ ID NO: 4364 - RNA, 20 nt, Artificial Sequence
  SAMD9L targeting guide sequence portion
ugacuccaaaauggauggug

SEQ ID NO: 4365 - RNA, 20 nt, Artificial Sequence
  SAMD9L targeting guide sequence portion
uggaauuggugcgugaauuc

SEQ ID NO: 4366 - RNA, 20 nt, Artificial Sequence
  SAMD9L targeting guide sequence portion
uggaugguggaauuggugcg

SEQ ID NO: 4367 - RNA, 20 nt, Artificial Sequence
  SAMD9L targeting guide sequence portion
ugguggaauuggugcgugaa

SEQ ID NO: 4368 - RNA, 20 nt, Artificial Sequence
  SAMD9L targeting guide sequence portion
uguaugaauucacgcaccaa

SEQ ID NO: 4369 - RNA, 20 nt, Artificial Sequence
  SAMD9L targeting guide sequence portion
uucacgcaccaauuccacca

SEQ ID NO: 4370 - RNA, 20 nt, Artificial Sequence
  SAMD9L targeting guide sequence portion
uuccaccauccauuuuggag

SEQ ID NO: 4371 - RNA, 20 nt, Artificial Sequence
  SAMD9L targeting guide sequence portion
uugacuccaaaauggauggu

SEQ ID NO: 4372 - RNA, 20 nt, Artificial Sequence
  SAMD9L targeting guide sequence portion
uuguaugaauucacgcacca

SEQ ID NO: 4373 - RNA, 21 nt, Artificial Sequence
  SAMD9L targeting guide sequence portion
aaaauggaugguggaauuggu

SEQ ID NO: 4374 - RNA, 21 nt, Artificial Sequence
  SAMD9L targeting guide sequence portion
aaauggaugguggaauuggug

SEQ ID NO: 4375 - RNA, 21 nt, Artificial Sequence
  SAMD9L targeting guide sequence portion
aauggaugguggaauuggugc

SEQ ID NO: 4376 - RNA, 21 nt, Artificial Sequence
  SAMD9L targeting guide sequence portion
aauucacgcaccaauuccacc

SEQ ID NO: 4377 - RNA, 21 nt, Artificial Sequence
  SAMD9L targeting guide sequence portion
aauuccaccauccauuuugga

SEQ ID NO: 4378 - RNA, 21 nt, Artificial Sequence
  SAMD9L targeting guide sequence portion
accaauuccaccauccauuuu

SEQ ID NO: 4379 - RNA, 21 nt, Artificial Sequence
  SAMD9L targeting guide sequence portion
acgcaccaauuccaccaucca

SEQ ID NO: 4380 - RNA, 21 nt, Artificial Sequence
  SAMD9L targeting guide sequence portion
acuccaaaauggaugguggaa

SEQ ID NO: 4381 - RNA, 21 nt, Artificial Sequence
  SAMD9L targeting guide sequence portion
agcuuguaugaauucacgcac

SEQ ID NO: 4382 - RNA, 21 nt, Artificial Sequence
  SAMD9L targeting guide sequence portion
augaauucacgcaccaauucc

SEQ ID NO: 4383 - RNA, 21 nt, Artificial Sequence
  SAMD9L targeting guide sequence portion
auggaugguggaauuggugcg

SEQ ID NO: 4384 - RNA, 21 nt, Artificial Sequence
  SAMD9L targeting guide sequence portion
augguggaauuggugcgugaa

SEQ ID NO: 4385 - RNA, 21 nt, Artificial Sequence
  SAMD9L targeting guide sequence portion
auucacgcaccaauuccacca

SEQ ID NO: 4386 - RNA, 21 nt, Artificial Sequence
  SAMD9L targeting guide sequence portion
auuccaccauccauuuuggag

SEQ ID NO: 4387 - RNA, 21 nt, Artificial Sequence
  SAMD9L targeting guide sequence portion
caaaauggaugguggaauugg

SEQ ID NO: 4388 - RNA, 21 nt, Artificial Sequence
  SAMD9L targeting guide sequence portion
caauuccaccauccauuuugg

SEQ ID NO: 4389 - RNA, 21 nt, Artificial Sequence
  SAMD9L targeting guide sequence portion
caccaauuccaccauccauuu

SEQ ID NO: 4390 - RNA, 21 nt, Artificial Sequence
  SAMD9L targeting guide sequence portion
cacgcaccaauuccaccaucc

SEQ ID NO: 4391 - RNA, 21 nt, Artificial Sequence
  SAMD9L targeting guide sequence portion
ccaaaauggaugguggaauug

SEQ ID NO: 4392 - RNA, 21 nt, Artificial Sequence
  SAMD9L targeting guide sequence portion
ccaauuccaccauccauuuug

SEQ ID NO: 4393 - RNA, 21 nt, Artificial Sequence
  SAMD9L targeting guide sequence portion
ccaccauccauuuuggaguca

SEQ ID NO: 4394 - RNA, 21 nt, Artificial Sequence
  SAMD9L targeting guide sequence portion
ccuugacuccaaaauggaugg

SEQ ID NO: 4395 - RNA, 21 nt, Artificial Sequence
  SAMD9L targeting guide sequence portion
cgcaccaauuccaccauccau

SEQ ID NO: 4396 - RNA, 21 nt, Artificial Sequence
  SAMD9L targeting guide sequence portion
cuccaaaauggaugguggaau

SEQ ID NO: 4397 - RNA, 21 nt, Artificial Sequence
  SAMD9L targeting guide sequence portion
cuugacuccaaaauggauggu

SEQ ID NO: 4398 - RNA, 21 nt, Artificial Sequence
  SAMD9L targeting guide sequence portion
cuuguaugaauucacgcacca

SEQ ID NO: 4399 - RNA, 21 nt, Artificial Sequence
  SAMD9L targeting guide sequence portion
gaauucacgcaccaauuccac

SEQ ID NO: 4400 - RNA, 21 nt, Artificial Sequence
  SAMD9L targeting guide sequence portion
gaauuggugcgugaauucaua

SEQ ID NO: 4401 - RNA, 21 nt, Artificial Sequence
  SAMD9L targeting guide sequence portion
gacuccaaaauggauggugga

SEQ ID NO: 4402 - RNA, 21 nt, Artificial Sequence
  SAMD9L targeting guide sequence portion
gaugguggaauuggugcguga

SEQ ID NO: 4403 - RNA, 21 nt, Artificial Sequence
  SAMD9L targeting guide sequence portion
gcaccaauuccaccauccauu

SEQ ID NO: 4404 - RNA, 21 nt, Artificial Sequence
  SAMD9L targeting guide sequence portion
gcuuguaugaauucacgcacc

SEQ ID NO: 4405 - RNA, 21 nt, Artificial Sequence
  SAMD9L targeting guide sequence portion
ggaauuggugcgugaauucau

SEQ ID NO: 4406 - RNA, 21 nt, Artificial Sequence
  SAMD9L targeting guide sequence portion
ggaugguggaauuggugcgug

SEQ ID NO: 4407 - RNA, 21 nt, Artificial Sequence
  SAMD9L targeting guide sequence portion
gguggaauuggugcgugaauu

SEQ ID NO: 4408 - RNA, 21 nt, Artificial Sequence
  SAMD9L targeting guide sequence portion
guaugaauucacgcaccaauu

SEQ ID NO: 4409 - RNA, 21 nt, Artificial Sequence
  SAMD9L targeting guide sequence portion
guccuugacuccaaaauggau

SEQ ID NO: 4410 - RNA, 21 nt, Artificial Sequence
  SAMD9L targeting guide sequence portion
guggaauuggugcgugaauuc

SEQ ID NO: 4411 - RNA, 21 nt, Artificial Sequence
  SAMD9L targeting guide sequence portion
uaugaauucacgcaccaauuc

SEQ ID NO: 4412 - RNA, 21 nt, Artificial Sequence
  SAMD9L targeting guide sequence portion
ucacgcaccaauuccaccauc

SEQ ID NO: 4413 - RNA, 21 nt, Artificial Sequence
  SAMD9L targeting guide sequence portion
uccaaaauggaugguggaauu

SEQ ID NO: 4414 - RNA, 21 nt, Artificial Sequence
  SAMD9L targeting guide sequence portion
uccaccauccauuuuggaguc

SEQ ID NO: 4415 - RNA, 21 nt, Artificial Sequence
  SAMD9L targeting guide sequence portion
uccuugacuccaaaauggaug

SEQ ID NO: 4416 - RNA, 21 nt, Artificial Sequence
  SAMD9L targeting guide sequence portion
ugaauucacgcaccaauucca

SEQ ID NO: 4417 - RNA, 21 nt, Artificial Sequence
  SAMD9L targeting guide sequence portion
ugacuccaaaauggauggugg

SEQ ID NO: 4418 - RNA, 21 nt, Artificial Sequence
  SAMD9L targeting guide sequence portion
uggaauuggugcgugaauuca

SEQ ID NO: 4419 - RNA, 21 nt, Artificial Sequence
  SAMD9L targeting guide sequence portion
uggaugguggaauuggugcgu

SEQ ID NO: 4420 - RNA, 21 nt, Artificial Sequence
  SAMD9L targeting guide sequence portion
ugguggaauuggugcgugaau

SEQ ID NO: 4421 - RNA, 21 nt, Artificial Sequence
  SAMD9L targeting guide sequence portion
uguaugaauucacgcaccaau

SEQ ID NO: 4422 - RNA, 21 nt, Artificial Sequence
  SAMD9L targeting guide sequence portion
uguccuugacuccaaaaugga

SEQ ID NO: 4423 - RNA, 21 nt, Artificial Sequence
  SAMD9L targeting guide sequence portion
uucacgcaccaauuccaccau

SEQ ID NO: 4424 - RNA, 21 nt, Artificial Sequence
  SAMD9L targeting guide sequence portion
uuccaccauccauuuuggagu

SEQ ID NO: 4425 - RNA, 21 nt, Artificial Sequence
  SAMD9L targeting guide sequence portion
uugacuccaaaauggauggug

SEQ ID NO: 4426 - RNA, 21 nt, Artificial Sequence
  SAMD9L targeting guide sequence portion
uuguaugaauucacgcaccaa

SEQ ID NO: 4427 - RNA, 22 nt, Artificial Sequence
  SAMD9L targeting guide sequence portion
aaaauggaugguggaauuggug

SEQ ID NO: 4428 - RNA, 22 nt, Artificial Sequence
  SAMD9L targeting guide sequence portion
aaauggaugguggaauuggugc

SEQ ID NO: 4429 - RNA, 22 nt, Artificial Sequence
  SAMD9L targeting guide sequence portion
aauggaugguggaauuggugcg

SEQ ID NO: 4430 - RNA, 22 nt, Artificial Sequence
  SAMD9L targeting guide sequence portion
aauucacgcaccaauuccacca

SEQ ID NO: 4431 - RNA, 22 nt, Artificial Sequence
  SAMD9L targeting guide sequence portion
aauuccaccauccauuuuggag

SEQ ID NO: 4432 - RNA, 22 nt, Artificial Sequence
  SAMD9L targeting guide sequence portion
accaauuccaccauccauuuug

SEQ ID NO: 4433 - RNA, 22 nt, Artificial Sequence
  SAMD9L targeting guide sequence portion
acgcaccaauuccaccauccau

SEQ ID NO: 4434 - RNA, 22 nt, Artificial Sequence
  SAMD9L targeting guide sequence portion
acuccaaaauggaugguggaau

SEQ ID NO: 4435 - RNA, 22 nt, Artificial Sequence
  SAMD9L targeting guide sequence portion
agcuuguaugaauucacgcacc

SEQ ID NO: 4436 - RNA, 22 nt, Artificial Sequence
  SAMD9L targeting guide sequence portion
augaauucacgcaccaauucca

SEQ ID NO: 4437 - RNA, 22 nt, Artificial Sequence
  SAMD9L targeting guide sequence portion
auggaugguggaauuggugcgu

SEQ ID NO: 4438 - RNA, 22 nt, Artificial Sequence
  SAMD9L targeting guide sequence portion
augguggaauuggugcgugaau

SEQ ID NO: 4439 - RNA, 22 nt, Artificial Sequence
  SAMD9L targeting guide sequence portion
auucacgcaccaauuccaccau

SEQ ID NO: 4440 - RNA, 22 nt, Artificial Sequence
  SAMD9L targeting guide sequence portion
auuccaccauccauuuuggagu

SEQ ID NO: 4441 - RNA, 22 nt, Artificial Sequence
  SAMD9L targeting guide sequence portion
caaaauggaugguggaauuggu

SEQ ID NO: 4442 - RNA, 22 nt, Artificial Sequence
  SAMD9L targeting guide sequence portion
caauuccaccauccauuuugga

SEQ ID NO: 4443 - RNA, 22 nt, Artificial Sequence
  SAMD9L targeting guide sequence portion
caccaauuccaccauccauuuu

SEQ ID NO: 4444 - RNA, 22 nt, Artificial Sequence
  SAMD9L targeting guide sequence portion
cacgcaccaauuccaccaucca

SEQ ID NO: 4445 - RNA, 22 nt, Artificial Sequence
  SAMD9L targeting guide sequence portion
cagcuuguaugaauucacgcac

SEQ ID NO: 4446 - RNA, 22 nt, Artificial Sequence
  SAMD9L targeting guide sequence portion
ccaaaauggaugguggaauugg

SEQ ID NO: 4447 - RNA, 22 nt, Artificial Sequence
  SAMD9L targeting guide sequence portion
ccaauuccaccauccauuuugg

SEQ ID NO: 4448 - RNA, 22 nt, Artificial Sequence
  SAMD9L targeting guide sequence portion
ccaccauccauuuuggagucaa

SEQ ID NO: 4449 - RNA, 22 nt, Artificial Sequence
  SAMD9L targeting guide sequence portion
ccuugacuccaaaauggauggu

SEQ ID NO: 4450 - RNA, 22 nt, Artificial Sequence
  SAMD9L targeting guide sequence portion
cgcaccaauuccaccauccauu

SEQ ID NO: 4451 - RNA, 22 nt, Artificial Sequence
  SAMD9L targeting guide sequence portion
cuccaaaauggaugguggaauu

SEQ ID NO: 4452 - RNA, 22 nt, Artificial Sequence
  SAMD9L targeting guide sequence portion
cuugacuccaaaauggauggug

SEQ ID NO: 4453 - RNA, 22 nt, Artificial Sequence
  SAMD9L targeting guide sequence portion
cuuguaugaauucacgcaccaa

SEQ ID NO: 4454 - RNA, 22 nt, Artificial Sequence
  SAMD9L targeting guide sequence portion
gaauucacgcaccaauuccacc

SEQ ID NO: 4455 - RNA, 22 nt, Artificial Sequence
  SAMD9L targeting guide sequence portion
gaauuggugcgugaauucauac

SEQ ID NO: 4456 - RNA, 22 nt, Artificial Sequence
  SAMD9L targeting guide sequence portion
gacuccaaaauggaugguggaa

SEQ ID NO: 4457 - RNA, 22 nt, Artificial Sequence
  SAMD9L targeting guide sequence portion
gaugguggaauuggugcgugaa

SEQ ID NO: 4458 - RNA, 22 nt, Artificial Sequence
  SAMD9L targeting guide sequence portion
gcaccaauuccaccauccauuu

SEQ ID NO: 4459 - RNA, 22 nt, Artificial Sequence
  SAMD9L targeting guide sequence portion
gcuuguaugaauucacgcacca

SEQ ID NO: 4460 - RNA, 22 nt, Artificial Sequence
  SAMD9L targeting guide sequence portion
ggaauuggugcgugaauucaua

SEQ ID NO: 4461 - RNA, 22 nt, Artificial Sequence
  SAMD9L targeting guide sequence portion
ggaugguggaauuggugcguga

SEQ ID NO: 4462 - RNA, 22 nt, Artificial Sequence
  SAMD9L targeting guide sequence portion
gguggaauuggugcgugaauuc

SEQ ID NO: 4463 - RNA, 22 nt, Artificial Sequence
  SAMD9L targeting guide sequence portion
guaugaauucacgcaccaauuc

SEQ ID NO: 4464 - RNA, 22 nt, Artificial Sequence
  SAMD9L targeting guide sequence portion
guccuugacuccaaaauggaug

SEQ ID NO: 4465 - RNA, 22 nt, Artificial Sequence
  SAMD9L targeting guide sequence portion
guggaauuggugcgugaauuca

SEQ ID NO: 4466 - RNA, 22 nt, Artificial Sequence
  SAMD9L targeting guide sequence portion
uaugaauucacgcaccaauucc

SEQ ID NO: 4467 - RNA, 22 nt, Artificial Sequence
  SAMD9L targeting guide sequence portion
ucacgcaccaauuccaccaucc

SEQ ID NO: 4468 - RNA, 22 nt, Artificial Sequence
  SAMD9L targeting guide sequence portion
uccaaaauggaugguggaauug

SEQ ID NO: 4469 - RNA, 22 nt, Artificial Sequence
  SAMD9L targeting guide sequence portion
uccaccauccauuuuggaguca

SEQ ID NO: 4470 - RNA, 22 nt, Artificial Sequence
  SAMD9L targeting guide sequence portion
uccuugacuccaaaauggaugg

SEQ ID NO: 4471 - RNA, 22 nt, Artificial Sequence
  SAMD9L targeting guide sequence portion
ugaauucacgcaccaauuccac

SEQ ID NO: 4472 - RNA, 22 nt, Artificial Sequence
  SAMD9L targeting guide sequence portion
ugacuccaaaauggauggugga

SEQ ID NO: 4473 - RNA, 22 nt, Artificial Sequence
  SAMD9L targeting guide sequence portion
uggaauuggugcgugaauucau

SEQ ID NO: 4474 - RNA, 22 nt, Artificial Sequence
  SAMD9L targeting guide sequence portion
uggaugguggaauuggugcgug

SEQ ID NO: 4475 - RNA, 22 nt, Artificial Sequence
  SAMD9L targeting guide sequence portion
ugguggaauuggugcgugaauu

SEQ ID NO: 4476 - RNA, 22 nt, Artificial Sequence
  SAMD9L targeting guide sequence portion
uguaugaauucacgcaccaauu

SEQ ID NO: 4477 - RNA, 22 nt, Artificial Sequence
  SAMD9L targeting guide sequence portion
uguccuugacuccaaaauggau

SEQ ID NO: 4478 - RNA, 22 nt, Artificial Sequence
  SAMD9L targeting guide sequence portion
uucacgcaccaauuccaccauc

SEQ ID NO: 4479 - RNA, 22 nt, Artificial Sequence
  SAMD9L targeting guide sequence portion
uuccaccauccauuuuggaguc

SEQ ID NO: 4480 - RNA, 22 nt, Artificial Sequence
  SAMD9L targeting guide sequence portion
uugacuccaaaauggauggugg

SEQ ID NO: 4481 - RNA, 22 nt, Artificial Sequence
  SAMD9L targeting guide sequence portion
uuguaugaauucacgcaccaau

SEQ ID NO: 4482 - RNA, 22 nt, Artificial Sequence
  SAMD9L targeting guide sequence portion
uuguccuugacuccaaaaugga

SEQ ID NO: 4483 - RNA, 20 nt, Artificial Sequence
  SAMD9L targeting guide sequence portion
aaaauggauggugcuauugg

SEQ ID NO: 4484 - RNA, 20 nt, Artificial Sequence
  SAMD9L targeting guide sequence portion
aaauggauggugcuauuggu

SEQ ID NO: 4485 - RNA, 20 nt, Artificial Sequence
  SAMD9L targeting guide sequence portion
aauagcaccauccauuuugg

SEQ ID NO: 4486 - RNA, 20 nt, Artificial Sequence
  SAMD9L targeting guide sequence portion
aauggauggugcuauuggug

SEQ ID NO: 4487 - RNA, 20 nt, Artificial Sequence
  SAMD9L targeting guide sequence portion
aauucacgcaccaauagcac

SEQ ID NO: 4488 - RNA, 20 nt, Artificial Sequence
  SAMD9L targeting guide sequence portion
accaauagcaccauccauuu

SEQ ID NO: 4489 - RNA, 20 nt, Artificial Sequence
  SAMD9L targeting guide sequence portion
acgcaccaauagcaccaucc

SEQ ID NO: 4490 - RNA, 20 nt, Artificial Sequence
  SAMD9L targeting guide sequence portion
acuccaaaauggauggugcu

SEQ ID NO: 4491 - RNA, 20 nt, Artificial Sequence
  SAMD9L targeting guide sequence portion
agcaccauccauuuuggagu

SEQ ID NO: 4492 - RNA, 20 nt, Artificial Sequence
  SAMD9L targeting guide sequence portion
agcuuguaugaauucacgca

SEQ ID NO: 4493 - RNA, 20 nt, Artificial Sequence
  SAMD9L targeting guide sequence portion
auagcaccauccauuuugga

SEQ ID NO: 4494 - RNA, 20 nt, Artificial Sequence
  SAMD9L targeting guide sequence portion
augaauucacgcaccaauag

SEQ ID NO: 4495 - RNA, 20 nt, Artificial Sequence
  SAMD9L targeting guide sequence portion
auggauggugcuauuggugc

SEQ ID NO: 4496 - RNA, 20 nt, Artificial Sequence
  SAMD9L targeting guide sequence portion
auggugcuauuggugcguga

SEQ ID NO: 4497 - RNA, 20 nt, Artificial Sequence
  SAMD9L targeting guide sequence portion
auucacgcaccaauagcacc

SEQ ID NO: 4498 - RNA, 20 nt, Artificial Sequence
  SAMD9L targeting guide sequence portion
caaaauggauggugcuauug

SEQ ID NO: 4499 - RNA, 20 nt, Artificial Sequence
  SAMD9L targeting guide sequence portion
caauagcaccauccauuuug

SEQ ID NO: 4500 - RNA, 20 nt, Artificial Sequence
  SAMD9L targeting guide sequence portion
caccaauagcaccauccauu

SEQ ID NO: 4501 - RNA, 20 nt, Artificial Sequence
  SAMD9L targeting guide sequence portion
cacgcaccaauagcaccauc

SEQ ID NO: 4502 - RNA, 20 nt, Artificial Sequence
  SAMD9L targeting guide sequence portion
ccaaaauggauggugcuauu

SEQ ID NO: 4503 - RNA, 20 nt, Artificial Sequence
  SAMD9L targeting guide sequence portion
ccaauagcaccauccauuuu

SEQ ID NO: 4504 - RNA, 20 nt, Artificial Sequence
  SAMD9L targeting guide sequence portion
cgcaccaauagcaccaucca

SEQ ID NO: 4505 - RNA, 20 nt, Artificial Sequence
  SAMD9L targeting guide sequence portion
cuauuggugcgugaauucau

SEQ ID NO: 4506 - RNA, 20 nt, Artificial Sequence
  SAMD9L targeting guide sequence portion
cuccaaaauggauggugcua

SEQ ID NO: 4507 - RNA, 20 nt, Artificial Sequence
  SAMD9L targeting guide sequence portion
gaauucacgcaccaauagca

SEQ ID NO: 4508 - RNA, 20 nt, Artificial Sequence
  SAMD9L targeting guide sequence portion
gacuccaaaauggauggugc

SEQ ID NO: 4509 - RNA, 20 nt, Artificial Sequence
  SAMD9L targeting guide sequence portion
gauggugcuauuggugcgug

SEQ ID NO: 4510 - RNA, 20 nt, Artificial Sequence
  SAMD9L targeting guide sequence portion
gcaccaauagcaccauccau

SEQ ID NO: 4511 - RNA, 20 nt, Artificial Sequence
  SAMD9L targeting guide sequence portion
gcuauuggugcgugaauuca

SEQ ID NO: 4512 - RNA, 20 nt, Artificial Sequence
  SAMD9L targeting guide sequence portion
ggauggugcuauuggugcgu

SEQ ID NO: 4513 - RNA, 20 nt, Artificial Sequence
  SAMD9L targeting guide sequence portion
ggugcuauuggugcgugaau

SEQ ID NO: 4514 - RNA, 20 nt, Artificial Sequence
  SAMD9L targeting guide sequence portion
gugcuauuggugcgugaauu

SEQ ID NO: 4515 - RNA, 20 nt, Artificial Sequence
  SAMD9L targeting guide sequence portion
uagcaccauccauuuuggag

SEQ ID NO: 4516 - RNA, 20 nt, Artificial Sequence
  SAMD9L targeting guide sequence portion
uaugaauucacgcaccaaua

SEQ ID NO: 4517 - RNA, 20 nt, Artificial Sequence
  SAMD9L targeting guide sequence portion
uauuggugcgugaauucaua

SEQ ID NO: 4518 - RNA, 20 nt, Artificial Sequence
  SAMD9L targeting guide sequence portion
ucacgcaccaauagcaccau

SEQ ID NO: 4519 - RNA, 20 nt, Artificial Sequence
  SAMD9L targeting guide sequence portion
uccaaaauggauggugcuau

SEQ ID NO: 4520 - RNA, 20 nt, Artificial Sequence
  SAMD9L targeting guide sequence portion
ugaauucacgcaccaauagc

SEQ ID NO: 4521 - RNA, 20 nt, Artificial Sequence
  SAMD9L targeting guide sequence portion
ugcuauuggugcgugaauuc

SEQ ID NO: 4522 - RNA, 20 nt, Artificial Sequence
  SAMD9L targeting guide sequence portion
uggauggugcuauuggugcg

SEQ ID NO: 4523 - RNA, 20 nt, Artificial Sequence
  SAMD9L targeting guide sequence portion
uggugcuauuggugcgugaa

SEQ ID NO: 4524 - RNA, 20 nt, Artificial Sequence
  SAMD9L targeting guide sequence portion
uucacgcaccaauagcacca

SEQ ID NO: 4525 - RNA, 21 nt, Artificial Sequence
  SAMD9L targeting guide sequence portion
aaaauggauggugcuauuggu

SEQ ID NO: 4526 - RNA, 21 nt, Artificial Sequence
  SAMD9L targeting guide sequence portion
aaauggauggugcuauuggug

SEQ ID NO: 4527 - RNA, 21 nt, Artificial Sequence
  SAMD9L targeting guide sequence portion
aauagcaccauccauuuugga

SEQ ID NO: 4528 - RNA, 21 nt, Artificial Sequence
  SAMD9L targeting guide sequence portion
aauggauggugcuauuggugc

SEQ ID NO: 4529 - RNA, 21 nt, Artificial Sequence
  SAMD9L targeting guide sequence portion
aauucacgcaccaauagcacc

SEQ ID NO: 4530 - RNA, 21 nt, Artificial Sequence
  SAMD9L targeting guide sequence portion
accaauagcaccauccauuuu

SEQ ID NO: 4531 - RNA, 21 nt, Artificial Sequence
  SAMD9L targeting guide sequence portion
acgcaccaauagcaccaucca

SEQ ID NO: 4532 - RNA, 21 nt, Artificial Sequence
  SAMD9L targeting guide sequence portion
acuccaaaauggauggugcua

SEQ ID NO: 4533 - RNA, 21 nt, Artificial Sequence
  SAMD9L targeting guide sequence portion
agcaccauccauuuuggaguc

SEQ ID NO: 4534 - RNA, 21 nt, Artificial Sequence
  SAMD9L targeting guide sequence portion
auagcaccauccauuuuggag

SEQ ID NO: 4535 - RNA, 21 nt, Artificial Sequence
  SAMD9L targeting guide sequence portion
augaauucacgcaccaauagc

SEQ ID NO: 4536 - RNA, 21 nt, Artificial Sequence
  SAMD9L targeting guide sequence portion
auggauggugcuauuggugcg

SEQ ID NO: 4537 - RNA, 21 nt, Artificial Sequence
  SAMD9L targeting guide sequence portion
auggugcuauuggugcgugaa

SEQ ID NO: 4538 - RNA, 21 nt, Artificial Sequence
  SAMD9L targeting guide sequence portion
auucacgcaccaauagcacca

SEQ ID NO: 4539 - RNA, 21 nt, Artificial Sequence
  SAMD9L targeting guide sequence portion
caaaauggauggugcuauugg

SEQ ID NO: 4540 - RNA, 21 nt, Artificial Sequence
  SAMD9L targeting guide sequence portion
caauagcaccauccauuuugg

SEQ ID NO: 4541 - RNA, 21 nt, Artificial Sequence
  SAMD9L targeting guide sequence portion
caccaauagcaccauccauuu

SEQ ID NO: 4542 - RNA, 21 nt, Artificial Sequence
  SAMD9L targeting guide sequence portion
cacgcaccaauagcaccaucc

SEQ ID NO: 4543 - RNA, 21 nt, Artificial Sequence
  SAMD9L targeting guide sequence portion
cagcuuguaugaauucacgca

SEQ ID NO: 4544 - RNA, 21 nt, Artificial Sequence
  SAMD9L targeting guide sequence portion
ccaaaauggauggugcuauug

SEQ ID NO: 4545 - RNA, 21 nt, Artificial Sequence
  SAMD9L targeting guide sequence portion
ccaauagcaccauccauuuug

SEQ ID NO: 4546 - RNA, 21 nt, Artificial Sequence
  SAMD9L targeting guide sequence portion
cgcaccaauagcaccauccau

SEQ ID NO: 4547 - RNA, 21 nt, Artificial Sequence
  SAMD9L targeting guide sequence portion
cuauuggugcgugaauucaua

SEQ ID NO: 4548 - RNA, 21 nt, Artificial Sequence
  SAMD9L targeting guide sequence portion
cuccaaaauggauggugcuau

SEQ ID NO: 4549 - RNA, 21 nt, Artificial Sequence
  SAMD9L targeting guide sequence portion
gaauucacgcaccaauagcac

SEQ ID NO: 4550 - RNA, 21 nt, Artificial Sequence
  SAMD9L targeting guide sequence portion
gacuccaaaauggauggugcu

SEQ ID NO: 4551 - RNA, 21 nt, Artificial Sequence
  SAMD9L targeting guide sequence portion
gauggugcuauuggugcguga

SEQ ID NO: 4552 - RNA, 21 nt, Artificial Sequence
  SAMD9L targeting guide sequence portion
gcaccaauagcaccauccauu

SEQ ID NO: 4553 - RNA, 21 nt, Artificial Sequence
  SAMD9L targeting guide sequence portion
gcuauuggugcgugaauucau

SEQ ID NO: 4554 - RNA, 21 nt, Artificial Sequence
  SAMD9L targeting guide sequence portion
ggauggugcuauuggugcgug

SEQ ID NO: 4555 - RNA, 21 nt, Artificial Sequence
  SAMD9L targeting guide sequence portion
ggugcuauuggugcgugaauu

SEQ ID NO: 4556 - RNA, 21 nt, Artificial Sequence
  SAMD9L targeting guide sequence portion
guaugaauucacgcaccaaua

SEQ ID NO: 4557 - RNA, 21 nt, Artificial Sequence
  SAMD9L targeting guide sequence portion
gugcuauuggugcgugaauuc

SEQ ID NO: 4558 - RNA, 21 nt, Artificial Sequence
  SAMD9L targeting guide sequence portion
uagcaccauccauuuuggagu

SEQ ID NO: 4559 - RNA, 21 nt, Artificial Sequence
  SAMD9L targeting guide sequence portion
uaugaauucacgcaccaauag

SEQ ID NO: 4560 - RNA, 21 nt, Artificial Sequence
  SAMD9L targeting guide sequence portion
uauuggugcgugaauucauac

SEQ ID NO: 4561 - RNA, 21 nt, Artificial Sequence
  SAMD9L targeting guide sequence portion
ucacgcaccaauagcaccauc

SEQ ID NO: 4562 - RNA, 21 nt, Artificial Sequence
  SAMD9L targeting guide sequence portion
uccaaaauggauggugcuauu

SEQ ID NO: 4563 - RNA, 21 nt, Artificial Sequence
  SAMD9L targeting guide sequence portion
ugaauucacgcaccaauagca

SEQ ID NO: 4564 - RNA, 21 nt, Artificial Sequence
  SAMD9L targeting guide sequence portion
ugacuccaaaauggauggugc

SEQ ID NO: 4565 - RNA, 21 nt, Artificial Sequence
  SAMD9L targeting guide sequence portion
ugcuauuggugcgugaauuca

SEQ ID NO: 4566 - RNA, 21 nt, Artificial Sequence
  SAMD9L targeting guide sequence portion
uggauggugcuauuggugcgu

SEQ ID NO: 4567 - RNA, 21 nt, Artificial Sequence
  SAMD9L targeting guide sequence portion
uggugcuauuggugcgugaau

SEQ ID NO: 4568 - RNA, 21 nt, Artificial Sequence
  SAMD9L targeting guide sequence portion
uucacgcaccaauagcaccau

SEQ ID NO: 4569 - RNA, 22 nt, Artificial Sequence
  SAMD9L targeting guide sequence portion
aaaauggauggugcuauuggug

SEQ ID NO: 4570 - RNA, 22 nt, Artificial Sequence
  SAMD9L targeting guide sequence portion
aaauggauggugcuauuggugc

SEQ ID NO: 4571 - RNA, 22 nt, Artificial Sequence
  SAMD9L targeting guide sequence portion
aauagcaccauccauuuuggag

SEQ ID NO: 4572 - RNA, 22 nt, Artificial Sequence
  SAMD9L targeting guide sequence portion
aauggauggugcuauuggugcg

SEQ ID NO: 4573 - RNA, 22 nt, Artificial Sequence
  SAMD9L targeting guide sequence portion
aauucacgcaccaauagcacca

SEQ ID NO: 4574 - RNA, 22 nt, Artificial Sequence
  SAMD9L targeting guide sequence portion
accaauagcaccauccauuuug

SEQ ID NO: 4575 - RNA, 22 nt, Artificial Sequence
  SAMD9L targeting guide sequence portion
acgcaccaauagcaccauccau

SEQ ID NO: 4576 - RNA, 22 nt, Artificial Sequence
  SAMD9L targeting guide sequence portion
acuccaaaauggauggugcuau

SEQ ID NO: 4577 - RNA, 22 nt, Artificial Sequence
  SAMD9L targeting guide sequence portion
agcaccauccauuuuggaguca

SEQ ID NO: 4578 - RNA, 22 nt, Artificial Sequence
  SAMD9L targeting guide sequence portion
auagcaccauccauuuuggagu

SEQ ID NO: 4579 - RNA, 22 nt, Artificial Sequence
  SAMD9L targeting guide sequence portion
augaauucacgcaccaauagca

SEQ ID NO: 4580 - RNA, 22 nt, Artificial Sequence
  SAMD9L targeting guide sequence portion
auggauggugcuauuggugcgu

SEQ ID NO: 4581 - RNA, 22 nt, Artificial Sequence
  SAMD9L targeting guide sequence portion
auggugcuauuggugcgugaau

SEQ ID NO: 4582 - RNA, 22 nt, Artificial Sequence
  SAMD9L targeting guide sequence portion
auucacgcaccaauagcaccau

SEQ ID NO: 4583 - RNA, 22 nt, Artificial Sequence
  SAMD9L targeting guide sequence portion
caaaauggauggugcuauuggu

SEQ ID NO: 4584 - RNA, 22 nt, Artificial Sequence
  SAMD9L targeting guide sequence portion
caauagcaccauccauuuugga

SEQ ID NO: 4585 - RNA, 22 nt, Artificial Sequence
  SAMD9L targeting guide sequence portion
caccaauagcaccauccauuuu

SEQ ID NO: 4586 - RNA, 22 nt, Artificial Sequence
  SAMD9L targeting guide sequence portion
cacgcaccaauagcaccaucca

SEQ ID NO: 4587 - RNA, 22 nt, Artificial Sequence
  SAMD9L targeting guide sequence portion
ccaaaauggauggugcuauugg

SEQ ID NO: 4588 - RNA, 22 nt, Artificial Sequence
  SAMD9L targeting guide sequence portion
ccaauagcaccauccauuuugg

SEQ ID NO: 4589 - RNA, 22 nt, Artificial Sequence
  SAMD9L targeting guide sequence portion
cgcaccaauagcaccauccauu

SEQ ID NO: 4590 - RNA, 22 nt, Artificial Sequence
  SAMD9L targeting guide sequence portion
cuauuggugcgugaauucauac

SEQ ID NO: 4591 - RNA, 22 nt, Artificial Sequence
  SAMD9L targeting guide sequence portion
cuccaaaauggauggugcuauu

SEQ ID NO: 4592 - RNA, 22 nt, Artificial Sequence
  SAMD9L targeting guide sequence portion
gaauucacgcaccaauagcacc

SEQ ID NO: 4593 - RNA, 22 nt, Artificial Sequence
  SAMD9L targeting guide sequence portion
gacuccaaaauggauggugcua

SEQ ID NO: 4594 - RNA, 22 nt, Artificial Sequence
  SAMD9L targeting guide sequence portion
gauggugcuauuggugcgugaa

SEQ ID NO: 4595 - RNA, 22 nt, Artificial Sequence
  SAMD9L targeting guide sequence portion
gcaccaauagcaccauccauuu

SEQ ID NO: 4596 - RNA, 22 nt, Artificial Sequence
  SAMD9L targeting guide sequence portion
gcuauuggugcgugaauucaua

SEQ ID NO: 4597 - RNA, 22 nt, Artificial Sequence
  SAMD9L targeting guide sequence portion
ggauggugcuauuggugcguga

SEQ ID NO: 4598 - RNA, 22 nt, Artificial Sequence
  SAMD9L targeting guide sequence portion
ggugcuauuggugcgugaauuc

SEQ ID NO: 4599 - RNA, 22 nt, Artificial Sequence
  SAMD9L targeting guide sequence portion
guaugaauucacgcaccaauag

SEQ ID NO: 4600 - RNA, 22 nt, Artificial Sequence
  SAMD9L targeting guide sequence portion
gugcuauuggugcgugaauuca

SEQ ID NO: 4601 - RNA, 22 nt, Artificial Sequence
  SAMD9L targeting guide sequence portion
uagcaccauccauuuuggaguc

SEQ ID NO: 4602 - RNA, 22 nt, Artificial Sequence
  SAMD9L targeting guide sequence portion
uaugaauucacgcaccaauagc

SEQ ID NO: 4603 - RNA, 22 nt, Artificial Sequence
  SAMD9L targeting guide sequence portion
uauuggugcgugaauucauaca

SEQ ID NO: 4604 - RNA, 22 nt, Artificial Sequence
  SAMD9L targeting guide sequence portion
ucacgcaccaauagcaccaucc

SEQ ID NO: 4605 - RNA, 22 nt, Artificial Sequence
  SAMD9L targeting guide sequence portion
ucagcuuguaugaauucacgca

SEQ ID NO: 4606 - RNA, 22 nt, Artificial Sequence
  SAMD9L targeting guide sequence portion
uccaaaauggauggugcuauug

SEQ ID NO: 4607 - RNA, 22 nt, Artificial Sequence
  SAMD9L targeting guide sequence portion
ugaauucacgcaccaauagcac

SEQ ID NO: 4608 - RNA, 22 nt, Artificial Sequence
  SAMD9L targeting guide sequence portion
ugacuccaaaauggauggugcu

SEQ ID NO: 4609 - RNA, 22 nt, Artificial Sequence
  SAMD9L targeting guide sequence portion
ugcuauuggugcgugaauucau

SEQ ID NO: 4610 - RNA, 22 nt, Artificial Sequence
  SAMD9L targeting guide sequence portion
uggauggugcuauuggugcgug

SEQ ID NO: 4611 - RNA, 22 nt, Artificial Sequence
  SAMD9L targeting guide sequence portion
uggugcuauuggugcgugaauu

SEQ ID NO: 4612 - RNA, 22 nt, Artificial Sequence
  SAMD9L targeting guide sequence portion
uguaugaauucacgcaccaaua

SEQ ID NO: 4613 - RNA, 22 nt, Artificial Sequence
  SAMD9L targeting guide sequence portion
uucacgcaccaauagcaccauc

SEQ ID NO: 4614 - RNA, 22 nt, Artificial Sequence
  SAMD9L targeting guide sequence portion
uugacuccaaaauggauggugc

SEQ ID NO: 4615 - RNA, 20 nt, Artificial Sequence
  SAMD9L targeting guide sequence portion
aaaucggaagacuccauugc

SEQ ID NO: 4616 - RNA, 20 nt, Artificial Sequence
  SAMD9L targeting guide sequence portion
aaauucagcaauggagucuu

SEQ ID NO: 4617 - RNA, 20 nt, Artificial Sequence
  SAMD9L targeting guide sequence portion
aagacuccauugcugaauuu

SEQ ID NO: 4618 - RNA, 20 nt, Artificial Sequence
  SAMD9L targeting guide sequence portion
aagaugaaauucagcaaugg

SEQ ID NO: 4619 - RNA, 20 nt, Artificial Sequence
  SAMD9L targeting guide sequence portion
aagcugaugcaaaucggaag

SEQ ID NO: 4620 - RNA, 20 nt, Artificial Sequence
  SAMD9L targeting guide sequence portion
aaucggaagacuccauugcu

SEQ ID NO: 4621 - RNA, 20 nt, Artificial Sequence
  SAMD9L targeting guide sequence portion
aauggagucuuccgauuugc

SEQ ID NO: 4622 - RNA, 20 nt, Artificial Sequence
  SAMD9L targeting guide sequence portion
aauucagcaauggagucuuc

SEQ ID NO: 4623 - RNA, 20 nt, Artificial Sequence
  SAMD9L targeting guide sequence portion
acaagcugaugcaaaucgga

SEQ ID NO: 4624 - RNA, 20 nt, Artificial Sequence
  SAMD9L targeting guide sequence portion
acauuaagaugaaauucagc

SEQ ID NO: 4625 - RNA, 20 nt, Artificial Sequence
  SAMD9L targeting guide sequence portion
acuccauugcugaauuucau

SEQ ID NO: 4626 - RNA, 20 nt, Artificial Sequence
  SAMD9L targeting guide sequence portion
agacuccauugcugaauuuc

SEQ ID NO: 4627 - RNA, 20 nt, Artificial Sequence
  SAMD9L targeting guide sequence portion
agaugaaauucagcaaugga

SEQ ID NO: 4628 - RNA, 20 nt, Artificial Sequence
  SAMD9L targeting guide sequence portion
agcaauggagucuuccgauu

SEQ ID NO: 4629 - RNA, 20 nt, Artificial Sequence
  SAMD9L targeting guide sequence portion
agcugaugcaaaucggaaga

SEQ ID NO: 4630 - RNA, 20 nt, Artificial Sequence
  SAMD9L targeting guide sequence portion
aucggaagacuccauugcug

SEQ ID NO: 4631 - RNA, 20 nt, Artificial Sequence
  SAMD9L targeting guide sequence portion
augaaauucagcaauggagu

SEQ ID NO: 4632 - RNA, 20 nt, Artificial Sequence
  SAMD9L targeting guide sequence portion
augcaaaucggaagacucca

SEQ ID NO: 4633 - RNA, 20 nt, Artificial Sequence
  SAMD9L targeting guide sequence portion
auggagucuuccgauuugca

SEQ ID NO: 4634 - RNA, 20 nt, Artificial Sequence
  SAMD9L targeting guide sequence portion
auuaagaugaaauucagcaa

SEQ ID NO: 4635 - RNA, 20 nt, Artificial Sequence
  SAMD9L targeting guide sequence portion
auucagcaauggagucuucc

SEQ ID NO: 4636 - RNA, 20 nt, Artificial Sequence
  SAMD9L targeting guide sequence portion
caaaucggaagacuccauug

SEQ ID NO: 4637 - RNA, 20 nt, Artificial Sequence
  SAMD9L targeting guide sequence portion
caagcugaugcaaaucggaa

SEQ ID NO: 4638 - RNA, 20 nt, Artificial Sequence
  SAMD9L targeting guide sequence portion
caauggagucuuccgauuug

SEQ ID NO: 4639 - RNA, 20 nt, Artificial Sequence
  SAMD9L targeting guide sequence portion
cagcaauggagucuuccgau

SEQ ID NO: 4640 - RNA, 20 nt, Artificial Sequence
  SAMD9L targeting guide sequence portion
cauuaagaugaaauucagca

SEQ ID NO: 4641 - RNA, 20 nt, Artificial Sequence
  SAMD9L targeting guide sequence portion
ccauugcugaauuucaucuu

SEQ ID NO: 4642 - RNA, 20 nt, Artificial Sequence
  SAMD9L targeting guide sequence portion
cggaagacuccauugcugaa

SEQ ID NO: 4643 - RNA, 20 nt, Artificial Sequence
  SAMD9L targeting guide sequence portion
cuccauugcugaauuucauc

SEQ ID NO: 4644 - RNA, 20 nt, Artificial Sequence
  SAMD9L targeting guide sequence portion
cugaugcaaaucggaagacu

SEQ ID NO: 4645 - RNA, 20 nt, Artificial Sequence
  SAMD9L targeting guide sequence portion
gaaauucagcaauggagucu

SEQ ID NO: 4646 - RNA, 20 nt, Artificial Sequence
  SAMD9L targeting guide sequence portion
gaagacuccauugcugaauu

SEQ ID NO: 4647 - RNA, 20 nt, Artificial Sequence
  SAMD9L targeting guide sequence portion
gacauuaagaugaaauucag

SEQ ID NO: 4648 - RNA, 20 nt, Artificial Sequence
  SAMD9L targeting guide sequence portion
gacuccauugcugaauuuca

SEQ ID NO: 4649 - RNA, 20 nt, Artificial Sequence
  SAMD9L targeting guide sequence portion
gagucuuccgauuugcauca

SEQ ID NO: 4650 - RNA, 20 nt, Artificial Sequence
  SAMD9L targeting guide sequence portion
gaugaaauucagcaauggag

SEQ ID NO: 4651 - RNA, 20 nt, Artificial Sequence
  SAMD9L targeting guide sequence portion
gaugcaaaucggaagacucc

SEQ ID NO: 4652 - RNA, 20 nt, Artificial Sequence
  SAMD9L targeting guide sequence portion
gcaaaucggaagacuccauu

SEQ ID NO: 4653 - RNA, 20 nt, Artificial Sequence
  SAMD9L targeting guide sequence portion
gcaauggagucuuccgauuu

SEQ ID NO: 4654 - RNA, 20 nt, Artificial Sequence
  SAMD9L targeting guide sequence portion
gcugaugcaaaucggaagac

SEQ ID NO: 4655 - RNA, 20 nt, Artificial Sequence
  SAMD9L targeting guide sequence portion
ggaagacuccauugcugaau

SEQ ID NO: 4656 - RNA, 20 nt, Artificial Sequence
  SAMD9L targeting guide sequence portion
ggagucuuccgauuugcauc

SEQ ID NO: 4657 - RNA, 20 nt, Artificial Sequence
  SAMD9L targeting guide sequence portion
uaagaugaaauucagcaaug

SEQ ID NO: 4658 - RNA, 20 nt, Artificial Sequence
  SAMD9L targeting guide sequence portion
ucagcaauggagucuuccga

SEQ ID NO: 4659 - RNA, 20 nt, Artificial Sequence
  SAMD9L targeting guide sequence portion
uccauugcugaauuucaucu

SEQ ID NO: 4660 - RNA, 20 nt, Artificial Sequence
  SAMD9L targeting guide sequence portion
ucggaagacuccauugcuga

SEQ ID NO: 4661 - RNA, 20 nt, Artificial Sequence
  SAMD9L targeting guide sequence portion
ugaaauucagcaauggaguc

SEQ ID NO: 4662 - RNA, 20 nt, Artificial Sequence
  SAMD9L targeting guide sequence portion
ugaugcaaaucggaagacuc

SEQ ID NO: 4663 - RNA, 20 nt, Artificial Sequence
  SAMD9L targeting guide sequence portion
ugcaaaucggaagacuccau

SEQ ID NO: 4664 - RNA, 20 nt, Artificial Sequence
  SAMD9L targeting guide sequence portion
uggagucuuccgauuugcau

SEQ ID NO: 4665 - RNA, 20 nt, Artificial Sequence
  SAMD9L targeting guide sequence portion
uuaagaugaaauucagcaau

SEQ ID NO: 4666 - RNA, 20 nt, Artificial Sequence
  SAMD9L targeting guide sequence portion
uucagcaauggagucuuccg

SEQ ID NO: 4667 - RNA, 21 nt, Artificial Sequence
  SAMD9L targeting guide sequence portion
aaaucggaagacuccauugcu

SEQ ID NO: 4668 - RNA, 21 nt, Artificial Sequence
  SAMD9L targeting guide sequence portion
aaauucagcaauggagucuuc

SEQ ID NO: 4669 - RNA, 21 nt, Artificial Sequence
  SAMD9L targeting guide sequence portion
aagacuccauugcugaauuuc

SEQ ID NO: 4670 - RNA, 21 nt, Artificial Sequence
  SAMD9L targeting guide sequence portion
aagaugaaauucagcaaugga

SEQ ID NO: 4671 - RNA, 21 nt, Artificial Sequence
  SAMD9L targeting guide sequence portion
aagcugaugcaaaucggaaga

SEQ ID NO: 4672 - RNA, 21 nt, Artificial Sequence
  SAMD9L targeting guide sequence portion
aaucggaagacuccauugcug

SEQ ID NO: 4673 - RNA, 21 nt, Artificial Sequence
  SAMD9L targeting guide sequence portion
aauggagucuuccgauuugca

SEQ ID NO: 4674 - RNA, 21 nt, Artificial Sequence
  SAMD9L targeting guide sequence portion
aauucagcaauggagucuucc

SEQ ID NO: 4675 - RNA, 21 nt, Artificial Sequence
  SAMD9L targeting guide sequence portion
acaagcugaugcaaaucggaa

SEQ ID NO: 4676 - RNA, 21 nt, Artificial Sequence
  SAMD9L targeting guide sequence portion
acauuaagaugaaauucagca

SEQ ID NO: 4677 - RNA, 21 nt, Artificial Sequence
  SAMD9L targeting guide sequence portion
acuccauugcugaauuucauc

SEQ ID NO: 4678 - RNA, 21 nt, Artificial Sequence
  SAMD9L targeting guide sequence portion
agacuccauugcugaauuuca

SEQ ID NO: 4679 - RNA, 21 nt, Artificial Sequence
  SAMD9L targeting guide sequence portion
agaugaaauucagcaauggag

SEQ ID NO: 4680 - RNA, 21 nt, Artificial Sequence
  SAMD9L targeting guide sequence portion
agcaauggagucuuccgauuu

SEQ ID NO: 4681 - RNA, 21 nt, Artificial Sequence
  SAMD9L targeting guide sequence portion
agcugaugcaaaucggaagac

SEQ ID NO: 4682 - RNA, 21 nt, Artificial Sequence
  SAMD9L targeting guide sequence portion
aucggaagacuccauugcuga

SEQ ID NO: 4683 - RNA, 21 nt, Artificial Sequence
  SAMD9L targeting guide sequence portion
augaaauucagcaauggaguc

SEQ ID NO: 4684 - RNA, 21 nt, Artificial Sequence
  SAMD9L targeting guide sequence portion
augcaaaucggaagacuccau

SEQ ID NO: 4685 - RNA, 21 nt, Artificial Sequence
  SAMD9L targeting guide sequence portion
auggagucuuccgauuugcau

SEQ ID NO: 4686 - RNA, 21 nt, Artificial Sequence
  SAMD9L targeting guide sequence portion
auuaagaugaaauucagcaau

SEQ ID NO: 4687 - RNA, 21 nt, Artificial Sequence
  SAMD9L targeting guide sequence portion
auucagcaauggagucuuccg

SEQ ID NO: 4688 - RNA, 21 nt, Artificial Sequence
  SAMD9L targeting guide sequence portion
caaaucggaagacuccauugc

SEQ ID NO: 4689 - RNA, 21 nt, Artificial Sequence
  SAMD9L targeting guide sequence portion
caagcugaugcaaaucggaag

SEQ ID NO: 4690 - RNA, 21 nt, Artificial Sequence
  SAMD9L targeting guide sequence portion
caauggagucuuccgauuugc

SEQ ID NO: 4691 - RNA, 21 nt, Artificial Sequence
  SAMD9L targeting guide sequence portion
cagcaauggagucuuccgauu

SEQ ID NO: 4692 - RNA, 21 nt, Artificial Sequence
  SAMD9L targeting guide sequence portion
cauuaagaugaaauucagcaa

SEQ ID NO: 4693 - RNA, 21 nt, Artificial Sequence
  SAMD9L targeting guide sequence portion
ccauugcugaauuucaucuua

SEQ ID NO: 4694 - RNA, 21 nt, Artificial Sequence
  SAMD9L targeting guide sequence portion
cggaagacuccauugcugaau

SEQ ID NO: 4695 - RNA, 21 nt, Artificial Sequence
  SAMD9L targeting guide sequence portion
cuccauugcugaauuucaucu

SEQ ID NO: 4696 - RNA, 21 nt, Artificial Sequence
  SAMD9L targeting guide sequence portion
cugaugcaaaucggaagacuc

SEQ ID NO: 4697 - RNA, 21 nt, Artificial Sequence
  SAMD9L targeting guide sequence portion
gaaauucagcaauggagucuu

SEQ ID NO: 4698 - RNA, 21 nt, Artificial Sequence
  SAMD9L targeting guide sequence portion
gaagacuccauugcugaauuu

SEQ ID NO: 4699 - RNA, 21 nt, Artificial Sequence
  SAMD9L targeting guide sequence portion
gacauuaagaugaaauucagc

SEQ ID NO: 4700 - RNA, 21 nt, Artificial Sequence
  SAMD9L targeting guide sequence portion
gacuccauugcugaauuucau

SEQ ID NO: 4701 - RNA, 21 nt, Artificial Sequence
  SAMD9L targeting guide sequence portion
gagucuuccgauuugcaucag

SEQ ID NO: 4702 - RNA, 21 nt, Artificial Sequence
  SAMD9L targeting guide sequence portion
gaugaaauucagcaauggagu

SEQ ID NO: 4703 - RNA, 21 nt, Artificial Sequence
  SAMD9L targeting guide sequence portion
gaugcaaaucggaagacucca

SEQ ID NO: 4704 - RNA, 21 nt, Artificial Sequence
  SAMD9L targeting guide sequence portion
gcaaaucggaagacuccauug

SEQ ID NO: 4705 - RNA, 21 nt, Artificial Sequence
  SAMD9L targeting guide sequence portion
gcaauggagucuuccgauuug

SEQ ID NO: 4706 - RNA, 21 nt, Artificial Sequence
  SAMD9L targeting guide sequence portion
gcugaugcaaaucggaagacu

SEQ ID NO: 4707 - RNA, 21 nt, Artificial Sequence
  SAMD9L targeting guide sequence portion
ggaagacuccauugcugaauu

SEQ ID NO: 4708 - RNA, 21 nt, Artificial Sequence
  SAMD9L targeting guide sequence portion
ggacauuaagaugaaauucag

SEQ ID NO: 4709 - RNA, 21 nt, Artificial Sequence
  SAMD9L targeting guide sequence portion
ggagucuuccgauuugcauca

SEQ ID NO: 4710 - RNA, 21 nt, Artificial Sequence
  SAMD9L targeting guide sequence portion
uaagaugaaauucagcaaugg

SEQ ID NO: 4711 - RNA, 21 nt, Artificial Sequence
  SAMD9L targeting guide sequence portion
uacaagcugaugcaaaucgga

SEQ ID NO: 4712 - RNA, 21 nt, Artificial Sequence
  SAMD9L targeting guide sequence portion
ucagcaauggagucuuccgau

SEQ ID NO: 4713 - RNA, 21 nt, Artificial Sequence
  SAMD9L targeting guide sequence portion
uccauugcugaauuucaucuu

SEQ ID NO: 4714 - RNA, 21 nt, Artificial Sequence
  SAMD9L targeting guide sequence portion
ucggaagacuccauugcugaa

SEQ ID NO: 4715 - RNA, 21 nt, Artificial Sequence
  SAMD9L targeting guide sequence portion
ugaaauucagcaauggagucu

SEQ ID NO: 4716 - RNA, 21 nt, Artificial Sequence
  SAMD9L targeting guide sequence portion
ugaugcaaaucggaagacucc

SEQ ID NO: 4717 - RNA, 21 nt, Artificial Sequence
  SAMD9L targeting guide sequence portion
ugcaaaucggaagacuccauu

SEQ ID NO: 4718 - RNA, 21 nt, Artificial Sequence
  SAMD9L targeting guide sequence portion
uggagucuuccgauuugcauc

SEQ ID NO: 4719 - RNA, 21 nt, Artificial Sequence
  SAMD9L targeting guide sequence portion
uuaagaugaaauucagcaaug

SEQ ID NO: 4720 - RNA, 21 nt, Artificial Sequence
  SAMD9L targeting guide sequence portion
uucagcaauggagucuuccga

SEQ ID NO: 4721 - RNA, 22 nt, Artificial Sequence
  SAMD9L targeting guide sequence portion
aaaucggaagacuccauugcug

SEQ ID NO: 4722 - RNA, 22 nt, Artificial Sequence
  SAMD9L targeting guide sequence portion
aaauucagcaauggagucuucc

SEQ ID NO: 4723 - RNA, 22 nt, Artificial Sequence
  SAMD9L targeting guide sequence portion
aagacuccauugcugaauuuca

SEQ ID NO: 4724 - RNA, 22 nt, Artificial Sequence
  SAMD9L targeting guide sequence portion
aagaugaaauucagcaauggag

SEQ ID NO: 4725 - RNA, 22 nt, Artificial Sequence
  SAMD9L targeting guide sequence portion
aagcugaugcaaaucggaagac

SEQ ID NO: 4726 - RNA, 22 nt, Artificial Sequence
  SAMD9L targeting guide sequence portion
aaucggaagacuccauugcuga

SEQ ID NO: 4727 - RNA, 22 nt, Artificial Sequence
  SAMD9L targeting guide sequence portion
aauggagucuuccgauuugcau

SEQ ID NO: 4728 - RNA, 22 nt, Artificial Sequence
  SAMD9L targeting guide sequence portion
aauucagcaauggagucuuccg

SEQ ID NO: 4729 - RNA, 22 nt, Artificial Sequence
  SAMD9L targeting guide sequence portion
acaagcugaugcaaaucggaag

SEQ ID NO: 4730 - RNA, 22 nt, Artificial Sequence
  SAMD9L targeting guide sequence portion
acauuaagaugaaauucagcaa

SEQ ID NO: 4731 - RNA, 22 nt, Artificial Sequence
  SAMD9L targeting guide sequence portion
acuccauugcugaauuucaucu

SEQ ID NO: 4732 - RNA, 22 nt, Artificial Sequence
  SAMD9L targeting guide sequence portion
agacuccauugcugaauuucau

SEQ ID NO: 4733 - RNA, 22 nt, Artificial Sequence
  SAMD9L targeting guide sequence portion
agaugaaauucagcaauggagu

SEQ ID NO: 4734 - RNA, 22 nt, Artificial Sequence
  SAMD9L targeting guide sequence portion
agcaauggagucuuccgauuug

SEQ ID NO: 4735 - RNA, 22 nt, Artificial Sequence
  SAMD9L targeting guide sequence portion
agcugaugcaaaucggaagacu

SEQ ID NO: 4736 - RNA, 22 nt, Artificial Sequence
  SAMD9L targeting guide sequence portion
auacaagcugaugcaaaucgga

SEQ ID NO: 4737 - RNA, 22 nt, Artificial Sequence
  SAMD9L targeting guide sequence portion
aucggaagacuccauugcugaa

SEQ ID NO: 4738 - RNA, 22 nt, Artificial Sequence
  SAMD9L targeting guide sequence portion
augaaauucagcaauggagucu

SEQ ID NO: 4739 - RNA, 22 nt, Artificial Sequence
  SAMD9L targeting guide sequence portion
augcaaaucggaagacuccauu

SEQ ID NO: 4740 - RNA, 22 nt, Artificial Sequence
  SAMD9L targeting guide sequence portion
auggagucuuccgauuugcauc

SEQ ID NO: 4741 - RNA, 22 nt, Artificial Sequence
  SAMD9L targeting guide sequence portion
auuaagaugaaauucagcaaug

SEQ ID NO: 4742 - RNA, 22 nt, Artificial Sequence
  SAMD9L targeting guide sequence portion
auucagcaauggagucuuccga

SEQ ID NO: 4743 - RNA, 22 nt, Artificial Sequence
  SAMD9L targeting guide sequence portion
caaaucggaagacuccauugcu

SEQ ID NO: 4744 - RNA, 22 nt, Artificial Sequence
  SAMD9L targeting guide sequence portion
caagcugaugcaaaucggaaga

SEQ ID NO: 4745 - RNA, 22 nt, Artificial Sequence
  SAMD9L targeting guide sequence portion
caauggagucuuccgauuugca

SEQ ID NO: 4746 - RNA, 22 nt, Artificial Sequence
  SAMD9L targeting guide sequence portion
cagcaauggagucuuccgauuu

SEQ ID NO: 4747 - RNA, 22 nt, Artificial Sequence
  SAMD9L targeting guide sequence portion
cauuaagaugaaauucagcaau

SEQ ID NO: 4748 - RNA, 22 nt, Artificial Sequence
  SAMD9L targeting guide sequence portion
ccauugcugaauuucaucuuaa

SEQ ID NO: 4749 - RNA, 22 nt, Artificial Sequence
  SAMD9L targeting guide sequence portion
cggaagacuccauugcugaauu

SEQ ID NO: 4750 - RNA, 22 nt, Artificial Sequence
  SAMD9L targeting guide sequence portion
cuccauugcugaauuucaucuu

SEQ ID NO: 4751 - RNA, 22 nt, Artificial Sequence
  SAMD9L targeting guide sequence portion
cugaugcaaaucggaagacucc

SEQ ID NO: 4752 - RNA, 22 nt, Artificial Sequence
  SAMD9L targeting guide sequence portion
gaaauucagcaauggagucuuc

SEQ ID NO: 4753 - RNA, 22 nt, Artificial Sequence
  SAMD9L targeting guide sequence portion
gaagacuccauugcugaauuuc

SEQ ID NO: 4754 - RNA, 22 nt, Artificial Sequence
  SAMD9L targeting guide sequence portion
gacauuaagaugaaauucagca

SEQ ID NO: 4755 - RNA, 22 nt, Artificial Sequence
  SAMD9L targeting guide sequence portion
gacuccauugcugaauuucauc

SEQ ID NO: 4756 - RNA, 22 nt, Artificial Sequence
  SAMD9L targeting guide sequence portion
gagucuuccgauuugcaucagc

SEQ ID NO: 4757 - RNA, 22 nt, Artificial Sequence
  SAMD9L targeting guide sequence portion
gaugaaauucagcaauggaguc

SEQ ID NO: 4758 - RNA, 22 nt, Artificial Sequence
  SAMD9L targeting guide sequence portion
gaugcaaaucggaagacuccau

SEQ ID NO: 4759 - RNA, 22 nt, Artificial Sequence
  SAMD9L targeting guide sequence portion
gcaaaucggaagacuccauugc

SEQ ID NO: 4760 - RNA, 22 nt, Artificial Sequence
  SAMD9L targeting guide sequence portion
gcaauggagucuuccgauuugc

SEQ ID NO: 4761 - RNA, 22 nt, Artificial Sequence
  SAMD9L targeting guide sequence portion
gcugaugcaaaucggaagacuc

SEQ ID NO: 4762 - RNA, 22 nt, Artificial Sequence
  SAMD9L targeting guide sequence portion
ggaagacuccauugcugaauuu

SEQ ID NO: 4763 - RNA, 22 nt, Artificial Sequence
  SAMD9L targeting guide sequence portion
ggacauuaagaugaaauucagc

SEQ ID NO: 4764 - RNA, 22 nt, Artificial Sequence
  SAMD9L targeting guide sequence portion
ggagucuuccgauuugcaucag

SEQ ID NO: 4765 - RNA, 22 nt, Artificial Sequence
  SAMD9L targeting guide sequence portion
uaagaugaaauucagcaaugga

SEQ ID NO: 4766 - RNA, 22 nt, Artificial Sequence
  SAMD9L targeting guide sequence portion
uacaagcugaugcaaaucggaa

SEQ ID NO: 4767 - RNA, 22 nt, Artificial Sequence
  SAMD9L targeting guide sequence portion
ucagcaauggagucuuccgauu

SEQ ID NO: 4768 - RNA, 22 nt, Artificial Sequence
  SAMD9L targeting guide sequence portion
uccauugcugaauuucaucuua

SEQ ID NO: 4769 - RNA, 22 nt, Artificial Sequence
  SAMD9L targeting guide sequence portion
ucggaagacuccauugcugaau

SEQ ID NO: 4770 - RNA, 22 nt, Artificial Sequence
  SAMD9L targeting guide sequence portion
ugaaauucagcaauggagucuu

SEQ ID NO: 4771 - RNA, 22 nt, Artificial Sequence
  SAMD9L targeting guide sequence portion
ugaugcaaaucggaagacucca

SEQ ID NO: 4772 - RNA, 22 nt, Artificial Sequence
  SAMD9L targeting guide sequence portion
ugcaaaucggaagacuccauug

SEQ ID NO: 4773 - RNA, 22 nt, Artificial Sequence
  SAMD9L targeting guide sequence portion
uggacauuaagaugaaauucag

SEQ ID NO: 4774 - RNA, 22 nt, Artificial Sequence
  SAMD9L targeting guide sequence portion
uggagucuuccgauuugcauca

SEQ ID NO: 4775 - RNA, 22 nt, Artificial Sequence
  SAMD9L targeting guide sequence portion
uuaagaugaaauucagcaaugg

SEQ ID NO: 4776 - RNA, 22 nt, Artificial Sequence
  SAMD9L targeting guide sequence portion
uucagcaauggagucuuccgau

SEQ ID NO: 4777 - RNA, 20 nt, Artificial Sequence
  SAMD9L targeting guide sequence portion
aaagucuuccgauuugcauc

SEQ ID NO: 4778 - RNA, 20 nt, Artificial Sequence
  SAMD9L targeting guide sequence portion
aaaucggaagacuuuauugc

SEQ ID NO: 4779 - RNA, 20 nt, Artificial Sequence
  SAMD9L targeting guide sequence portion
aaauucagcaauaaagucuu

SEQ ID NO: 4780 - RNA, 20 nt, Artificial Sequence
  SAMD9L targeting guide sequence portion
aagacuuuauugcugaauuu

SEQ ID NO: 4781 - RNA, 20 nt, Artificial Sequence
  SAMD9L targeting guide sequence portion
aagaugaaauucagcaauaa

SEQ ID NO: 4782 - RNA, 20 nt, Artificial Sequence
  SAMD9L targeting guide sequence portion
aauaaagucuuccgauuugc

SEQ ID NO: 4783 - RNA, 20 nt, Artificial Sequence
  SAMD9L targeting guide sequence portion
aaucggaagacuuuauugcu

SEQ ID NO: 4784 - RNA, 20 nt, Artificial Sequence
  SAMD9L targeting guide sequence portion
aauucagcaauaaagucuuc

SEQ ID NO: 4785 - RNA, 20 nt, Artificial Sequence
  SAMD9L targeting guide sequence portion
acuuuauugcugaauuucau

SEQ ID NO: 4786 - RNA, 20 nt, Artificial Sequence
  SAMD9L targeting guide sequence portion
agacuuuauugcugaauuuc

SEQ ID NO: 4787 - RNA, 20 nt, Artificial Sequence
  SAMD9L targeting guide sequence portion
agaugaaauucagcaauaaa

SEQ ID NO: 4788 - RNA, 20 nt, Artificial Sequence
  SAMD9L targeting guide sequence portion
agcaauaaagucuuccgauu

SEQ ID NO: 4789 - RNA, 20 nt, Artificial Sequence
  SAMD9L targeting guide sequence portion
auaaagucuuccgauuugca

SEQ ID NO: 4790 - RNA, 20 nt, Artificial Sequence
  SAMD9L targeting guide sequence portion
aucggaagacuuuauugcug

SEQ ID NO: 4791 - RNA, 20 nt, Artificial Sequence
  SAMD9L targeting guide sequence portion
augaaauucagcaauaaagu

SEQ ID NO: 4792 - RNA, 20 nt, Artificial Sequence
  SAMD9L targeting guide sequence portion
augcaaaucggaagacuuua

SEQ ID NO: 4793 - RNA, 20 nt, Artificial Sequence
  SAMD9L targeting guide sequence portion
auucagcaauaaagucuucc

SEQ ID NO: 4794 - RNA, 20 nt, Artificial Sequence
  SAMD9L targeting guide sequence portion
caaaucggaagacuuuauug

SEQ ID NO: 4795 - RNA, 20 nt, Artificial Sequence
  SAMD9L targeting guide sequence portion
caauaaagucuuccgauuug

SEQ ID NO: 4796 - RNA, 20 nt, Artificial Sequence
  SAMD9L targeting guide sequence portion
cagcaauaaagucuuccgau

SEQ ID NO: 4797 - RNA, 20 nt, Artificial Sequence
  SAMD9L targeting guide sequence portion
cggaagacuuuauugcugaa

SEQ ID NO: 4798 - RNA, 20 nt, Artificial Sequence
  SAMD9L targeting guide sequence portion
cuuuauugcugaauuucauc

SEQ ID NO: 4799 - RNA, 20 nt, Artificial Sequence
  SAMD9L targeting guide sequence portion
gaaauucagcaauaaagucu

SEQ ID NO: 4800 - RNA, 20 nt, Artificial Sequence
  SAMD9L targeting guide sequence portion
gaagacuuuauugcugaauu

SEQ ID NO: 4801 - RNA, 20 nt, Artificial Sequence
  SAMD9L targeting guide sequence portion
gacuuuauugcugaauuuca

SEQ ID NO: 4802 - RNA, 20 nt, Artificial Sequence
  SAMD9L targeting guide sequence portion
gaugaaauucagcaauaaag

SEQ ID NO: 4803 - RNA, 20 nt, Artificial Sequence
  SAMD9L targeting guide sequence portion
gaugcaaaucggaagacuuu

SEQ ID NO: 4804 - RNA, 20 nt, Artificial Sequence
  SAMD9L targeting guide sequence portion
gcaaaucggaagacuuuauu

SEQ ID NO: 4805 - RNA, 20 nt, Artificial Sequence
  SAMD9L targeting guide sequence portion
gcaauaaagucuuccgauuu

SEQ ID NO: 4806 - RNA, 20 nt, Artificial Sequence
  SAMD9L targeting guide sequence portion
ggaagacuuuauugcugaau

SEQ ID NO: 4807 - RNA, 20 nt, Artificial Sequence
  SAMD9L targeting guide sequence portion
ggacauuaagaugaaauuca

SEQ ID NO: 4808 - RNA, 20 nt, Artificial Sequence
  SAMD9L targeting guide sequence portion
uaaagucuuccgauuugcau

SEQ ID NO: 4809 - RNA, 20 nt, Artificial Sequence
  SAMD9L targeting guide sequence portion
uaagaugaaauucagcaaua

SEQ ID NO: 4810 - RNA, 20 nt, Artificial Sequence
  SAMD9L targeting guide sequence portion
uauugcugaauuucaucuua

SEQ ID NO: 4811 - RNA, 20 nt, Artificial Sequence
  SAMD9L targeting guide sequence portion
ucagcaauaaagucuuccga

SEQ ID NO: 4812 - RNA, 20 nt, Artificial Sequence
  SAMD9L targeting guide sequence portion
ucggaagacuuuauugcuga

SEQ ID NO: 4813 - RNA, 20 nt, Artificial Sequence
  SAMD9L targeting guide sequence portion
ugaaauucagcaauaaaguc

SEQ ID NO: 4814 - RNA, 20 nt, Artificial Sequence
  SAMD9L targeting guide sequence portion
ugaugcaaaucggaagacuu

SEQ ID NO: 4815 - RNA, 20 nt, Artificial Sequence
  SAMD9L targeting guide sequence portion
ugcaaaucggaagacuuuau

SEQ ID NO: 4816 - RNA, 20 nt, Artificial Sequence
  SAMD9L targeting guide sequence portion
uuauugcugaauuucaucuu

SEQ ID NO: 4817 - RNA, 20 nt, Artificial Sequence
  SAMD9L targeting guide sequence portion
uucagcaauaaagucuuccg

SEQ ID NO: 4818 - RNA, 20 nt, Artificial Sequence
  SAMD9L targeting guide sequence portion
uuuauugcugaauuucaucu

SEQ ID NO: 4819 - RNA, 21 nt, Artificial Sequence
  SAMD9L targeting guide sequence portion
aaagucuuccgauuugcauca

SEQ ID NO: 4820 - RNA, 21 nt, Artificial Sequence
  SAMD9L targeting guide sequence portion
aaaucggaagacuuuauugcu

SEQ ID NO: 4821 - RNA, 21 nt, Artificial Sequence
  SAMD9L targeting guide sequence portion
aaauucagcaauaaagucuuc

SEQ ID NO: 4822 - RNA, 21 nt, Artificial Sequence
  SAMD9L targeting guide sequence portion
aagacuuuauugcugaauuuc

SEQ ID NO: 4823 - RNA, 21 nt, Artificial Sequence
  SAMD9L targeting guide sequence portion
aagaugaaauucagcaauaaa

SEQ ID NO: 4824 - RNA, 21 nt, Artificial Sequence
  SAMD9L targeting guide sequence portion
aauaaagucuuccgauuugca

SEQ ID NO: 4825 - RNA, 21 nt, Artificial Sequence
  SAMD9L targeting guide sequence portion
aaucggaagacuuuauugcug

SEQ ID NO: 4826 - RNA, 21 nt, Artificial Sequence
  SAMD9L targeting guide sequence portion
aauucagcaauaaagucuucc

SEQ ID NO: 4827 - RNA, 21 nt, Artificial Sequence
  SAMD9L targeting guide sequence portion
acuuuauugcugaauuucauc

SEQ ID NO: 4828 - RNA, 21 nt, Artificial Sequence
  SAMD9L targeting guide sequence portion
agacuuuauugcugaauuuca

SEQ ID NO: 4829 - RNA, 21 nt, Artificial Sequence
  SAMD9L targeting guide sequence portion
agaugaaauucagcaauaaag

SEQ ID NO: 4830 - RNA, 21 nt, Artificial Sequence
  SAMD9L targeting guide sequence portion
agcaauaaagucuuccgauuu

SEQ ID NO: 4831 - RNA, 21 nt, Artificial Sequence
  SAMD9L targeting guide sequence portion
auaaagucuuccgauuugcau

SEQ ID NO: 4832 - RNA, 21 nt, Artificial Sequence
  SAMD9L targeting guide sequence portion
aucggaagacuuuauugcuga

SEQ ID NO: 4833 - RNA, 21 nt, Artificial Sequence
  SAMD9L targeting guide sequence portion
augaaauucagcaauaaaguc

SEQ ID NO: 4834 - RNA, 21 nt, Artificial Sequence
  SAMD9L targeting guide sequence portion
augcaaaucggaagacuuuau

SEQ ID NO: 4835 - RNA, 21 nt, Artificial Sequence
  SAMD9L targeting guide sequence portion
auucagcaauaaagucuuccg

SEQ ID NO: 4836 - RNA, 21 nt, Artificial Sequence
  SAMD9L targeting guide sequence portion
caaaucggaagacuuuauugc

SEQ ID NO: 4837 - RNA, 21 nt, Artificial Sequence
  SAMD9L targeting guide sequence portion
caauaaagucuuccgauuugc

SEQ ID NO: 4838 - RNA, 21 nt, Artificial Sequence
  SAMD9L targeting guide sequence portion
cagcaauaaagucuuccgauu

SEQ ID NO: 4839 - RNA, 21 nt, Artificial Sequence
  SAMD9L targeting guide sequence portion
cggaagacuuuauugcugaau

SEQ ID NO: 4840 - RNA, 21 nt, Artificial Sequence
  SAMD9L targeting guide sequence portion
cugaugcaaaucggaagacuu

SEQ ID NO: 4841 - RNA, 21 nt, Artificial Sequence
  SAMD9L targeting guide sequence portion
cuuuauugcugaauuucaucu

SEQ ID NO: 4842 - RNA, 21 nt, Artificial Sequence
  SAMD9L targeting guide sequence portion
gaaauucagcaauaaagucuu

SEQ ID NO: 4843 - RNA, 21 nt, Artificial Sequence
  SAMD9L targeting guide sequence portion
gaagacuuuauugcugaauuu

SEQ ID NO: 4844 - RNA, 21 nt, Artificial Sequence
  SAMD9L targeting guide sequence portion
gacuuuauugcugaauuucau

SEQ ID NO: 4845 - RNA, 21 nt, Artificial Sequence
  SAMD9L targeting guide sequence portion
gaugaaauucagcaauaaagu

SEQ ID NO: 4846 - RNA, 21 nt, Artificial Sequence
  SAMD9L targeting guide sequence portion
gaugcaaaucggaagacuuua

SEQ ID NO: 4847 - RNA, 21 nt, Artificial Sequence
  SAMD9L targeting guide sequence portion
gcaaaucggaagacuuuauug

SEQ ID NO: 4848 - RNA, 21 nt, Artificial Sequence
  SAMD9L targeting guide sequence portion
gcaauaaagucuuccgauuug

SEQ ID NO: 4849 - RNA, 21 nt, Artificial Sequence
  SAMD9L targeting guide sequence portion
ggaagacuuuauugcugaauu

SEQ ID NO: 4850 - RNA, 21 nt, Artificial Sequence
  SAMD9L targeting guide sequence portion
uaaagucuuccgauuugcauc

SEQ ID NO: 4851 - RNA, 21 nt, Artificial Sequence
  SAMD9L targeting guide sequence portion
uaagaugaaauucagcaauaa

SEQ ID NO: 4852 - RNA, 21 nt, Artificial Sequence
  SAMD9L targeting guide sequence portion
uauugcugaauuucaucuuaa

SEQ ID NO: 4853 - RNA, 21 nt, Artificial Sequence
  SAMD9L targeting guide sequence portion
ucagcaauaaagucuuccgau

SEQ ID NO: 4854 - RNA, 21 nt, Artificial Sequence
  SAMD9L targeting guide sequence portion
ucggaagacuuuauugcugaa

SEQ ID NO: 4855 - RNA, 21 nt, Artificial Sequence
  SAMD9L targeting guide sequence portion
ugaaauucagcaauaaagucu

SEQ ID NO: 4856 - RNA, 21 nt, Artificial Sequence
  SAMD9L targeting guide sequence portion
ugaugcaaaucggaagacuuu

SEQ ID NO: 4857 - RNA, 21 nt, Artificial Sequence
  SAMD9L targeting guide sequence portion
ugcaaaucggaagacuuuauu

SEQ ID NO: 4858 - RNA, 21 nt, Artificial Sequence
  SAMD9L targeting guide sequence portion
uggacauuaagaugaaauuca

SEQ ID NO: 4859 - RNA, 21 nt, Artificial Sequence
  SAMD9L targeting guide sequence portion
uuaagaugaaauucagcaaua

SEQ ID NO: 4860 - RNA, 21 nt, Artificial Sequence
  SAMD9L targeting guide sequence portion
uuauugcugaauuucaucuua

SEQ ID NO: 4861 - RNA, 21 nt, Artificial Sequence
  SAMD9L targeting guide sequence portion
uucagcaauaaagucuuccga

SEQ ID NO: 4862 - RNA, 21 nt, Artificial Sequence
  SAMD9L targeting guide sequence portion
uuuauugcugaauuucaucuu

SEQ ID NO: 4863 - RNA, 22 nt, Artificial Sequence
  SAMD9L targeting guide sequence portion
aaagucuuccgauuugcaucag

SEQ ID NO: 4864 - RNA, 22 nt, Artificial Sequence
  SAMD9L targeting guide sequence portion
aaaucggaagacuuuauugcug

SEQ ID NO: 4865 - RNA, 22 nt, Artificial Sequence
  SAMD9L targeting guide sequence portion
aaauucagcaauaaagucuucc

SEQ ID NO: 4866 - RNA, 22 nt, Artificial Sequence
  SAMD9L targeting guide sequence portion
aagacuuuauugcugaauuuca

SEQ ID NO: 4867 - RNA, 22 nt, Artificial Sequence
  SAMD9L targeting guide sequence portion
aagaugaaauucagcaauaaag

SEQ ID NO: 4868 - RNA, 22 nt, Artificial Sequence
  SAMD9L targeting guide sequence portion
aauaaagucuuccgauuugcau

SEQ ID NO: 4869 - RNA, 22 nt, Artificial Sequence
  SAMD9L targeting guide sequence portion
aaucggaagacuuuauugcuga

SEQ ID NO: 4870 - RNA, 22 nt, Artificial Sequence
  SAMD9L targeting guide sequence portion
aauucagcaauaaagucuuccg

SEQ ID NO: 4871 - RNA, 22 nt, Artificial Sequence
  SAMD9L targeting guide sequence portion
acuuuauugcugaauuucaucu

SEQ ID NO: 4872 - RNA, 22 nt, Artificial Sequence
  SAMD9L targeting guide sequence portion
agacuuuauugcugaauuucau

SEQ ID NO: 4873 - RNA, 22 nt, Artificial Sequence
  SAMD9L targeting guide sequence portion
agaugaaauucagcaauaaagu

SEQ ID NO: 4874 - RNA, 22 nt, Artificial Sequence
  SAMD9L targeting guide sequence portion
agcaauaaagucuuccgauuug

SEQ ID NO: 4875 - RNA, 22 nt, Artificial Sequence
  SAMD9L targeting guide sequence portion
auaaagucuuccgauuugcauc

SEQ ID NO: 4876 - RNA, 22 nt, Artificial Sequence
  SAMD9L targeting guide sequence portion
aucggaagacuuuauugcugaa

SEQ ID NO: 4877 - RNA, 22 nt, Artificial Sequence
  SAMD9L targeting guide sequence portion
augaaauucagcaauaaagucu

SEQ ID NO: 4878 - RNA, 22 nt, Artificial Sequence
  SAMD9L targeting guide sequence portion
augcaaaucggaagacuuuauu

SEQ ID NO: 4879 - RNA, 22 nt, Artificial Sequence
  SAMD9L targeting guide sequence portion
auuaagaugaaauucagcaaua

SEQ ID NO: 4880 - RNA, 22 nt, Artificial Sequence
  SAMD9L targeting guide sequence portion
auucagcaauaaagucuuccga

SEQ ID NO: 4881 - RNA, 22 nt, Artificial Sequence
  SAMD9L targeting guide sequence portion
caaaucggaagacuuuauugcu

SEQ ID NO: 4882 - RNA, 22 nt, Artificial Sequence
  SAMD9L targeting guide sequence portion
caauaaagucuuccgauuugca

SEQ ID NO: 4883 - RNA, 22 nt, Artificial Sequence
  SAMD9L targeting guide sequence portion
cagcaauaaagucuuccgauuu

SEQ ID NO: 4884 - RNA, 22 nt, Artificial Sequence
  SAMD9L targeting guide sequence portion
cggaagacuuuauugcugaauu

SEQ ID NO: 4885 - RNA, 22 nt, Artificial Sequence
  SAMD9L targeting guide sequence portion
cugaugcaaaucggaagacuuu

SEQ ID NO: 4886 - RNA, 22 nt, Artificial Sequence
  SAMD9L targeting guide sequence portion
cuuuauugcugaauuucaucuu

SEQ ID NO: 4887 - RNA, 22 nt, Artificial Sequence
  SAMD9L targeting guide sequence portion
gaaauucagcaauaaagucuuc

SEQ ID NO: 4888 - RNA, 22 nt, Artificial Sequence
  SAMD9L targeting guide sequence portion
gaagacuuuauugcugaauuuc

SEQ ID NO: 4889 - RNA, 22 nt, Artificial Sequence
  SAMD9L targeting guide sequence portion
gacuuuauugcugaauuucauc

SEQ ID NO: 4890 - RNA, 22 nt, Artificial Sequence
  SAMD9L targeting guide sequence portion
gaugaaauucagcaauaaaguc

SEQ ID NO: 4891 - RNA, 22 nt, Artificial Sequence
  SAMD9L targeting guide sequence portion
gaugcaaaucggaagacuuuau

SEQ ID NO: 4892 - RNA, 22 nt, Artificial Sequence
  SAMD9L targeting guide sequence portion
gcaaaucggaagacuuuauugc

SEQ ID NO: 4893 - RNA, 22 nt, Artificial Sequence
  SAMD9L targeting guide sequence portion
gcaauaaagucuuccgauuugc

SEQ ID NO: 4894 - RNA, 22 nt, Artificial Sequence
  SAMD9L targeting guide sequence portion
gcugaugcaaaucggaagacuu

SEQ ID NO: 4895 - RNA, 22 nt, Artificial Sequence
  SAMD9L targeting guide sequence portion
ggaagacuuuauugcugaauuu

SEQ ID NO: 4896 - RNA, 22 nt, Artificial Sequence
  SAMD9L targeting guide sequence portion
guggacauuaagaugaaauuca

SEQ ID NO: 4897 - RNA, 22 nt, Artificial Sequence
  SAMD9L targeting guide sequence portion
uaaagucuuccgauuugcauca

SEQ ID NO: 4898 - RNA, 22 nt, Artificial Sequence
  SAMD9L targeting guide sequence portion
uaagaugaaauucagcaauaaa

SEQ ID NO: 4899 - RNA, 22 nt, Artificial Sequence
  SAMD9L targeting guide sequence portion
uauugcugaauuucaucuuaau

SEQ ID NO: 4900 - RNA, 22 nt, Artificial Sequence
  SAMD9L targeting guide sequence portion
ucagcaauaaagucuuccgauu

SEQ ID NO: 4901 - RNA, 22 nt, Artificial Sequence
  SAMD9L targeting guide sequence portion
ucggaagacuuuauugcugaau

SEQ ID NO: 4902 - RNA, 22 nt, Artificial Sequence
  SAMD9L targeting guide sequence portion
ugaaauucagcaauaaagucuu

SEQ ID NO: 4903 - RNA, 22 nt, Artificial Sequence
  SAMD9L targeting guide sequence portion
ugaugcaaaucggaagacuuua

SEQ ID NO: 4904 - RNA, 22 nt, Artificial Sequence
  SAMD9L targeting guide sequence portion
ugcaaaucggaagacuuuauug

SEQ ID NO: 4905 - RNA, 22 nt, Artificial Sequence
  SAMD9L targeting guide sequence portion
uuaagaugaaauucagcaauaa

SEQ ID NO: 4906 - RNA, 22 nt, Artificial Sequence
  SAMD9L targeting guide sequence portion
uuauugcugaauuucaucuuaa

SEQ ID NO: 4907 - RNA, 22 nt, Artificial Sequence
  SAMD9L targeting guide sequence portion
uucagcaauaaagucuuccgau

SEQ ID NO: 4908 - RNA, 22 nt, Artificial Sequence
  SAMD9L targeting guide sequence portion
uuuauugcugaauuucaucuua

SEQ ID NO: 4909 - RNA, 20 nt, Artificial Sequence
  SAMD9L targeting guide sequence portion
aauauugauuaugaucucag

SEQ ID NO: 4910 - RNA, 20 nt, Artificial Sequence
  SAMD9L targeting guide sequence portion
agaucauaaucaauauuaga

SEQ ID NO: 4911 - RNA, 20 nt, Artificial Sequence
  SAMD9L targeting guide sequence portion
auaucucugaucucucugag

SEQ ID NO: 4912 - RNA, 20 nt, Artificial Sequence
  SAMD9L targeting guide sequence portion
auauugauuaugaucucaga

SEQ ID NO: 4913 - RNA, 20 nt, Artificial Sequence
  SAMD9L targeting guide sequence portion
aucuaauauugauuaugauc

SEQ ID NO: 4914 - RNA, 20 nt, Artificial Sequence
  SAMD9L targeting guide sequence portion
aucucagagagaucagagau

SEQ ID NO: 4915 - RNA, 20 nt, Artificial Sequence
  SAMD9L targeting guide sequence portion
aucucucugagaucauaauc

SEQ ID NO: 4916 - RNA, 20 nt, Artificial Sequence
  SAMD9L targeting guide sequence portion
aucucugaucucucugagau

SEQ ID NO: 4917 - RNA, 20 nt, Artificial Sequence
  SAMD9L targeting guide sequence portion
augaucucagagagaucaga

SEQ ID NO: 4918 - RNA, 20 nt, Artificial Sequence
  SAMD9L targeting guide sequence portion
augucaucuaauauugauua

SEQ ID NO: 4919 - RNA, 20 nt, Artificial Sequence
  SAMD9L targeting guide sequence portion
auuaugaucucagagagauc

SEQ ID NO: 4920 - RNA, 20 nt, Artificial Sequence
  SAMD9L targeting guide sequence portion
auugauuaugaucucagaga

SEQ ID NO: 4921 - RNA, 20 nt, Artificial Sequence
  SAMD9L targeting guide sequence portion
caucuaauauugauuaugau

SEQ ID NO: 4922 - RNA, 20 nt, Artificial Sequence
  SAMD9L targeting guide sequence portion
cuaauauugauuaugaucuc

SEQ ID NO: 4923 - RNA, 20 nt, Artificial Sequence
  SAMD9L targeting guide sequence portion
cucagagagaucagagauau

SEQ ID NO: 4924 - RNA, 20 nt, Artificial Sequence
  SAMD9L targeting guide sequence portion
cucucugagaucauaaucaa

SEQ ID NO: 4925 - RNA, 20 nt, Artificial Sequence
  SAMD9L targeting guide sequence portion
cucugagaucauaaucaaua

SEQ ID NO: 4926 - RNA, 20 nt, Artificial Sequence
  SAMD9L targeting guide sequence portion
cucugaucucucugagauca

SEQ ID NO: 4927 - RNA, 20 nt, Artificial Sequence
  SAMD9L targeting guide sequence portion
cugagaucauaaucaauauu

SEQ ID NO: 4928 - RNA, 20 nt, Artificial Sequence
  SAMD9L targeting guide sequence portion
cugaucucucugagaucaua

SEQ ID NO: 4929 - RNA, 20 nt, Artificial Sequence
  SAMD9L targeting guide sequence portion
gagaucauaaucaauauuag

SEQ ID NO: 4930 - RNA, 20 nt, Artificial Sequence
  SAMD9L targeting guide sequence portion
gauaucucugaucucucuga

SEQ ID NO: 4931 - RNA, 20 nt, Artificial Sequence
  SAMD9L targeting guide sequence portion
gaucucagagagaucagaga

SEQ ID NO: 4932 - RNA, 20 nt, Artificial Sequence
  SAMD9L targeting guide sequence portion
gaucucucugagaucauaau

SEQ ID NO: 4933 - RNA, 20 nt, Artificial Sequence
  SAMD9L targeting guide sequence portion
gauuaugaucucagagagau

SEQ ID NO: 4934 - RNA, 20 nt, Artificial Sequence
  SAMD9L targeting guide sequence portion
gucaucuaauauugauuaug

SEQ ID NO: 4935 - RNA, 20 nt, Artificial Sequence
  SAMD9L targeting guide sequence portion
guuugauaucucugaucucu

SEQ ID NO: 4936 - RNA, 20 nt, Artificial Sequence
  SAMD9L targeting guide sequence portion
uaauauugauuaugaucuca

SEQ ID NO: 4937 - RNA, 20 nt, Artificial Sequence
  SAMD9L targeting guide sequence portion
uaucucugaucucucugaga

SEQ ID NO: 4938 - RNA, 20 nt, Artificial Sequence
  SAMD9L targeting guide sequence portion
uaugaucucagagagaucag

SEQ ID NO: 4939 - RNA, 20 nt, Artificial Sequence
  SAMD9L targeting guide sequence portion
uauugauuaugaucucagag

SEQ ID NO: 4940 - RNA, 20 nt, Artificial Sequence
  SAMD9L targeting guide sequence portion
ucagagagaucagagauauc

SEQ ID NO: 4941 - RNA, 20 nt, Artificial Sequence
  SAMD9L targeting guide sequence portion
ucaucuaauauugauuauga

SEQ ID NO: 4942 - RNA, 20 nt, Artificial Sequence
  SAMD9L targeting guide sequence portion
ucuaauauugauuaugaucu

SEQ ID NO: 4943 - RNA, 20 nt, Artificial Sequence
  SAMD9L targeting guide sequence portion
ucucagagagaucagagaua

SEQ ID NO: 4944 - RNA, 20 nt, Artificial Sequence
  SAMD9L targeting guide sequence portion
ucucucugagaucauaauca

SEQ ID NO: 4945 - RNA, 20 nt, Artificial Sequence
  SAMD9L targeting guide sequence portion
ucucugagaucauaaucaau

SEQ ID NO: 4946 - RNA, 20 nt, Artificial Sequence
  SAMD9L targeting guide sequence portion
ucucugaucucucugagauc

SEQ ID NO: 4947 - RNA, 20 nt, Artificial Sequence
  SAMD9L targeting guide sequence portion
ucugagaucauaaucaauau

SEQ ID NO: 4948 - RNA, 20 nt, Artificial Sequence
  SAMD9L targeting guide sequence portion
ucugaucucucugagaucau

SEQ ID NO: 4949 - RNA, 20 nt, Artificial Sequence
  SAMD9L targeting guide sequence portion
ugagaucauaaucaauauua

SEQ ID NO: 4950 - RNA, 20 nt, Artificial Sequence
  SAMD9L targeting guide sequence portion
ugauaucucugaucucucug

SEQ ID NO: 4951 - RNA, 20 nt, Artificial Sequence
  SAMD9L targeting guide sequence portion
ugaucucagagagaucagag

SEQ ID NO: 4952 - RNA, 20 nt, Artificial Sequence
  SAMD9L targeting guide sequence portion
ugaucucucugagaucauaa

SEQ ID NO: 4953 - RNA, 20 nt, Artificial Sequence
  SAMD9L targeting guide sequence portion
ugauuaugaucucagagaga

SEQ ID NO: 4954 - RNA, 20 nt, Artificial Sequence
  SAMD9L targeting guide sequence portion
ugucaucuaauauugauuau

SEQ ID NO: 4955 - RNA, 20 nt, Artificial Sequence
  SAMD9L targeting guide sequence portion
uguuugauaucucugaucuc

SEQ ID NO: 4956 - RNA, 20 nt, Artificial Sequence
  SAMD9L targeting guide sequence portion
uuaugaucucagagagauca

SEQ ID NO: 4957 - RNA, 20 nt, Artificial Sequence
  SAMD9L targeting guide sequence portion
uugauaucucugaucucucu

SEQ ID NO: 4958 - RNA, 20 nt, Artificial Sequence
  SAMD9L targeting guide sequence portion
uugauuaugaucucagagag

SEQ ID NO: 4959 - RNA, 20 nt, Artificial Sequence
  SAMD9L targeting guide sequence portion
uuguuugauaucucugaucu

SEQ ID NO: 4960 - RNA, 20 nt, Artificial Sequence
  SAMD9L targeting guide sequence portion
uuugauaucucugaucucuc

SEQ ID NO: 4961 - RNA, 21 nt, Artificial Sequence
  SAMD9L targeting guide sequence portion
aauauugauuaugaucucaga

SEQ ID NO: 4962 - RNA, 21 nt, Artificial Sequence
  SAMD9L targeting guide sequence portion
auaucucugaucucucugaga

SEQ ID NO: 4963 - RNA, 21 nt, Artificial Sequence
  SAMD9L targeting guide sequence portion
auauugauuaugaucucagag

SEQ ID NO: 4964 - RNA, 21 nt, Artificial Sequence
  SAMD9L targeting guide sequence portion
aucucagagagaucagagaua

SEQ ID NO: 4965 - RNA, 21 nt, Artificial Sequence
  SAMD9L targeting guide sequence portion
aucucucugagaucauaauca

SEQ ID NO: 4966 - RNA, 21 nt, Artificial Sequence
  SAMD9L targeting guide sequence portion
aucucugaucucucugagauc

SEQ ID NO: 4967 - RNA, 21 nt, Artificial Sequence
  SAMD9L targeting guide sequence portion
augaucucagagagaucagag

SEQ ID NO: 4968 - RNA, 21 nt, Artificial Sequence
  SAMD9L targeting guide sequence portion
auuaugaucucagagagauca

SEQ ID NO: 4969 - RNA, 21 nt, Artificial Sequence
  SAMD9L targeting guide sequence portion
auugauuaugaucucagagag

SEQ ID NO: 4970 - RNA, 21 nt, Artificial Sequence
  SAMD9L targeting guide sequence portion
caucuaauauugauuaugauc

SEQ ID NO: 4971 - RNA, 21 nt, Artificial Sequence
  SAMD9L targeting guide sequence portion
cuaauauugauuaugaucuca

SEQ ID NO: 4972 - RNA, 21 nt, Artificial Sequence
  SAMD9L targeting guide sequence portion
cucagagagaucagagauauc

SEQ ID NO: 4973 - RNA, 21 nt, Artificial Sequence
  SAMD9L targeting guide sequence portion
cucucugagaucauaaucaau

SEQ ID NO: 4974 - RNA, 21 nt, Artificial Sequence
  SAMD9L targeting guide sequence portion
cucugagaucauaaucaauau

SEQ ID NO: 4975 - RNA, 21 nt, Artificial Sequence
  SAMD9L targeting guide sequence portion
cucugaucucucugagaucau

SEQ ID NO: 4976 - RNA, 21 nt, Artificial Sequence
  SAMD9L targeting guide sequence portion
cugagaucauaaucaauauua

SEQ ID NO: 4977 - RNA, 21 nt, Artificial Sequence
  SAMD9L targeting guide sequence portion
cugaucucucugagaucauaa

SEQ ID NO: 4978 - RNA, 21 nt, Artificial Sequence
  SAMD9L targeting guide sequence portion
cuuguuugauaucucugaucu

SEQ ID NO: 4979 - RNA, 21 nt, Artificial Sequence
  SAMD9L targeting guide sequence portion
gagaucauaaucaauauuaga

SEQ ID NO: 4980 - RNA, 21 nt, Artificial Sequence
  SAMD9L targeting guide sequence portion
gauaucucugaucucucugag

SEQ ID NO: 4981 - RNA, 21 nt, Artificial Sequence
  SAMD9L targeting guide sequence portion
gaucucagagagaucagagau

SEQ ID NO: 4982 - RNA, 21 nt, Artificial Sequence
  SAMD9L targeting guide sequence portion
gaucucucugagaucauaauc

SEQ ID NO: 4983 - RNA, 21 nt, Artificial Sequence
  SAMD9L targeting guide sequence portion
gauuaugaucucagagagauc

SEQ ID NO: 4984 - RNA, 21 nt, Artificial Sequence
  SAMD9L targeting guide sequence portion
gucaucuaauauugauuauga

SEQ ID NO: 4985 - RNA, 21 nt, Artificial Sequence
  SAMD9L targeting guide sequence portion
guuugauaucucugaucucuc

SEQ ID NO: 4986 - RNA, 21 nt, Artificial Sequence
  SAMD9L targeting guide sequence portion
uaauauugauuaugaucucag

SEQ ID NO: 4987 - RNA, 21 nt, Artificial Sequence
  SAMD9L targeting guide sequence portion
uaucucugaucucucugagau

SEQ ID NO: 4988 - RNA, 21 nt, Artificial Sequence
  SAMD9L targeting guide sequence portion
uaugaucucagagagaucaga

SEQ ID NO: 4989 - RNA, 21 nt, Artificial Sequence
  SAMD9L targeting guide sequence portion
uauugauuaugaucucagaga

SEQ ID NO: 4990 - RNA, 21 nt, Artificial Sequence
  SAMD9L targeting guide sequence portion
ucagagagaucagagauauca

SEQ ID NO: 4991 - RNA, 21 nt, Artificial Sequence
  SAMD9L targeting guide sequence portion
ucuaauauugauuaugaucuc

SEQ ID NO: 4992 - RNA, 21 nt, Artificial Sequence
  SAMD9L targeting guide sequence portion
ucucagagagaucagagauau

SEQ ID NO: 4993 - RNA, 21 nt, Artificial Sequence
  SAMD9L targeting guide sequence portion
ucucucugagaucauaaucaa

SEQ ID NO: 4994 - RNA, 21 nt, Artificial Sequence
  SAMD9L targeting guide sequence portion
ucucugagaucauaaucaaua

SEQ ID NO: 4995 - RNA, 21 nt, Artificial Sequence
  SAMD9L targeting guide sequence portion
ucucugaucucucugagauca

SEQ ID NO: 4996 - RNA, 21 nt, Artificial Sequence
  SAMD9L targeting guide sequence portion
ucugagaucauaaucaauauu

SEQ ID NO: 4997 - RNA, 21 nt, Artificial Sequence
  SAMD9L targeting guide sequence portion
ucugaucucucugagaucaua

SEQ ID NO: 4998 - RNA, 21 nt, Artificial Sequence
  SAMD9L targeting guide sequence portion
ugagaucauaaucaauauuag

SEQ ID NO: 4999 - RNA, 21 nt, Artificial Sequence
  SAMD9L targeting guide sequence portion
ugauaucucugaucucucuga

SEQ ID NO: 5000 - RNA, 21 nt, Artificial Sequence
  SAMD9L targeting guide sequence portion
ugaucucagagagaucagaga

SEQ ID NO: 5001 - RNA, 21 nt, Artificial Sequence
  SAMD9L targeting guide sequence portion
ugaucucucugagaucauaau

SEQ ID NO: 5002 - RNA, 21 nt, Artificial Sequence
  SAMD9L targeting guide sequence portion
ugauuaugaucucagagagau

SEQ ID NO: 5003 - RNA, 21 nt, Artificial Sequence
  SAMD9L targeting guide sequence portion
ugucaucuaauauugauuaug

SEQ ID NO: 5004 - RNA, 21 nt, Artificial Sequence
  SAMD9L targeting guide sequence portion
uguuugauaucucugaucucu

SEQ ID NO: 5005 - RNA, 21 nt, Artificial Sequence
  SAMD9L targeting guide sequence portion
uuaugaucucagagagaucag

SEQ ID NO: 5006 - RNA, 21 nt, Artificial Sequence
  SAMD9L targeting guide sequence portion
uugauaucucugaucucucug

SEQ ID NO: 5007 - RNA, 21 nt, Artificial Sequence
  SAMD9L targeting guide sequence portion
uugauuaugaucucagagaga

SEQ ID NO: 5008 - RNA, 21 nt, Artificial Sequence
  SAMD9L targeting guide sequence portion
uuguuugauaucucugaucuc

SEQ ID NO: 5009 - RNA, 21 nt, Artificial Sequence
  SAMD9L targeting guide sequence portion
uuugauaucucugaucucucu

SEQ ID NO: 5010 - RNA, 22 nt, Artificial Sequence
  SAMD9L targeting guide sequence portion
aauauugauuaugaucucagag

SEQ ID NO: 5011 - RNA, 22 nt, Artificial Sequence
  SAMD9L targeting guide sequence portion
agaucauaaucaauauuagaug

SEQ ID NO: 5012 - RNA, 22 nt, Artificial Sequence
  SAMD9L targeting guide sequence portion
auaucucugaucucucugagau

SEQ ID NO: 5013 - RNA, 22 nt, Artificial Sequence
  SAMD9L targeting guide sequence portion
auauugauuaugaucucagaga

SEQ ID NO: 5014 - RNA, 22 nt, Artificial Sequence
  SAMD9L targeting guide sequence portion
aucuaauauugauuaugaucuc

SEQ ID NO: 5015 - RNA, 22 nt, Artificial Sequence
  SAMD9L targeting guide sequence portion
aucucagagagaucagagauau

SEQ ID NO: 5016 - RNA, 22 nt, Artificial Sequence
  SAMD9L targeting guide sequence portion
aucucucugagaucauaaucaa

SEQ ID NO: 5017 - RNA, 22 nt, Artificial Sequence
  SAMD9L targeting guide sequence portion
aucucugaucucucugagauca

SEQ ID NO: 5018 - RNA, 22 nt, Artificial Sequence
  SAMD9L targeting guide sequence portion
augaucucagagagaucagaga

SEQ ID NO: 5019 - RNA, 22 nt, Artificial Sequence
  SAMD9L targeting guide sequence portion
augucaucuaauauugauuaug

SEQ ID NO: 5020 - RNA, 22 nt, Artificial Sequence
  SAMD9L targeting guide sequence portion
auuaugaucucagagagaucag

SEQ ID NO: 5021 - RNA, 22 nt, Artificial Sequence
  SAMD9L targeting guide sequence portion
auugauuaugaucucagagaga

SEQ ID NO: 5022 - RNA, 22 nt, Artificial Sequence
  SAMD9L targeting guide sequence portion
caaugucaucuaauauugauua

SEQ ID NO: 5023 - RNA, 22 nt, Artificial Sequence
  SAMD9L targeting guide sequence portion
caucuaauauugauuaugaucu

SEQ ID NO: 5024 - RNA, 22 nt, Artificial Sequence
  SAMD9L targeting guide sequence portion
cuaauauugauuaugaucucag

SEQ ID NO: 5025 - RNA, 22 nt, Artificial Sequence
  SAMD9L targeting guide sequence portion
cucagagagaucagagauauca

SEQ ID NO: 5026 - RNA, 22 nt, Artificial Sequence
  SAMD9L targeting guide sequence portion
cucucugagaucauaaucaaua

SEQ ID NO: 5027 - RNA, 22 nt, Artificial Sequence
  SAMD9L targeting guide sequence portion
cucugagaucauaaucaauauu

SEQ ID NO: 5028 - RNA, 22 nt, Artificial Sequence
  SAMD9L targeting guide sequence portion
cucugaucucucugagaucaua

SEQ ID NO: 5029 - RNA, 22 nt, Artificial Sequence
  SAMD9L targeting guide sequence portion
cugagaucauaaucaauauuag

SEQ ID NO: 5030 - RNA, 22 nt, Artificial Sequence
  SAMD9L targeting guide sequence portion
cugaucucucugagaucauaau

SEQ ID NO: 5031 - RNA, 22 nt, Artificial Sequence
  SAMD9L targeting guide sequence portion
cuuguuugauaucucugaucuc

SEQ ID NO: 5032 - RNA, 22 nt, Artificial Sequence
  SAMD9L targeting guide sequence portion
gagaucauaaucaauauuagau

SEQ ID NO: 5033 - RNA, 22 nt, Artificial Sequence
  SAMD9L targeting guide sequence portion
gauaucucugaucucucugaga

SEQ ID NO: 5034 - RNA, 22 nt, Artificial Sequence
  SAMD9L targeting guide sequence portion
gaucucagagagaucagagaua

SEQ ID NO: 5035 - RNA, 22 nt, Artificial Sequence
  SAMD9L targeting guide sequence portion
gaucucucugagaucauaauca

SEQ ID NO: 5036 - RNA, 22 nt, Artificial Sequence
  SAMD9L targeting guide sequence portion
gauuaugaucucagagagauca

SEQ ID NO: 5037 - RNA, 22 nt, Artificial Sequence
  SAMD9L targeting guide sequence portion
gucaucuaauauugauuaugau

SEQ ID NO: 5038 - RNA, 22 nt, Artificial Sequence
  SAMD9L targeting guide sequence portion
guuugauaucucugaucucucu

SEQ ID NO: 5039 - RNA, 22 nt, Artificial Sequence
  SAMD9L targeting guide sequence portion
uaauauugauuaugaucucaga

SEQ ID NO: 5040 - RNA, 22 nt, Artificial Sequence
  SAMD9L targeting guide sequence portion
uaucucugaucucucugagauc

SEQ ID NO: 5041 - RNA, 22 nt, Artificial Sequence
  SAMD9L targeting guide sequence portion
uaugaucucagagagaucagag

SEQ ID NO: 5042 - RNA, 22 nt, Artificial Sequence
  SAMD9L targeting guide sequence portion
uauugauuaugaucucagagag

SEQ ID NO: 5043 - RNA, 22 nt, Artificial Sequence
  SAMD9L targeting guide sequence portion
ucagagagaucagagauaucaa

SEQ ID NO: 5044 - RNA, 22 nt, Artificial Sequence
  SAMD9L targeting guide sequence portion
ucaucuaauauugauuaugauc

SEQ ID NO: 5045 - RNA, 22 nt, Artificial Sequence
  SAMD9L targeting guide sequence portion
ucuaauauugauuaugaucuca

SEQ ID NO: 5046 - RNA, 22 nt, Artificial Sequence
  SAMD9L targeting guide sequence portion
ucucagagagaucagagauauc

SEQ ID NO: 5047 - RNA, 22 nt, Artificial Sequence
  SAMD9L targeting guide sequence portion
ucucucugagaucauaaucaau

SEQ ID NO: 5048 - RNA, 22 nt, Artificial Sequence
  SAMD9L targeting guide sequence portion
ucucugagaucauaaucaauau

SEQ ID NO: 5049 - RNA, 22 nt, Artificial Sequence
  SAMD9L targeting guide sequence portion
ucucugaucucucugagaucau

SEQ ID NO: 5050 - RNA, 22 nt, Artificial Sequence
  SAMD9L targeting guide sequence portion
ucugagaucauaaucaauauua

SEQ ID NO: 5051 - RNA, 22 nt, Artificial Sequence
  SAMD9L targeting guide sequence portion
ucugaucucucugagaucauaa

SEQ ID NO: 5052 - RNA, 22 nt, Artificial Sequence
  SAMD9L targeting guide sequence portion
ucuuguuugauaucucugaucu

SEQ ID NO: 5053 - RNA, 22 nt, Artificial Sequence
  SAMD9L targeting guide sequence portion
ugagaucauaaucaauauuaga

SEQ ID NO: 5054 - RNA, 22 nt, Artificial Sequence
  SAMD9L targeting guide sequence portion
ugauaucucugaucucucugag

SEQ ID NO: 5055 - RNA, 22 nt, Artificial Sequence
  SAMD9L targeting guide sequence portion
ugaucucagagagaucagagau

SEQ ID NO: 5056 - RNA, 22 nt, Artificial Sequence
  SAMD9L targeting guide sequence portion
ugaucucucugagaucauaauc

SEQ ID NO: 5057 - RNA, 22 nt, Artificial Sequence
  SAMD9L targeting guide sequence portion
ugauuaugaucucagagagauc

SEQ ID NO: 5058 - RNA, 22 nt, Artificial Sequence
  SAMD9L targeting guide sequence portion
ugucaucuaauauugauuauga

SEQ ID NO: 5059 - RNA, 22 nt, Artificial Sequence
  SAMD9L targeting guide sequence portion
uguuugauaucucugaucucuc

SEQ ID NO: 5060 - RNA, 22 nt, Artificial Sequence
  SAMD9L targeting guide sequence portion
uuaugaucucagagagaucaga

SEQ ID NO: 5061 - RNA, 22 nt, Artificial Sequence
  SAMD9L targeting guide sequence portion
uugauaucucugaucucucuga

SEQ ID NO: 5062 - RNA, 22 nt, Artificial Sequence
  SAMD9L targeting guide sequence portion
uugauuaugaucucagagagau

SEQ ID NO: 5063 - RNA, 22 nt, Artificial Sequence
  SAMD9L targeting guide sequence portion
uuguuugauaucucugaucucu

SEQ ID NO: 5064 - RNA, 22 nt, Artificial Sequence
  SAMD9L targeting guide sequence portion
uuugauaucucugaucucucug

SEQ ID NO: 5065 - RNA, 20 nt, Artificial Sequence
  SAMD9L targeting guide sequence portion
aacugagaaggaccuugcag

SEQ ID NO: 5066 - RNA, 20 nt, Artificial Sequence
  SAMD9L targeting guide sequence portion
aaggaccuugcagaaauggg

SEQ ID NO: 5067 - RNA, 20 nt, Artificial Sequence
  SAMD9L targeting guide sequence portion
aauuaacugagaaggaccuu

SEQ ID NO: 5068 - RNA, 20 nt, Artificial Sequence
  SAMD9L targeting guide sequence portion
accccaugguagccccauuu

SEQ ID NO: 5069 - RNA, 20 nt, Artificial Sequence
  SAMD9L targeting guide sequence portion
accuugcagaaauggggcua

SEQ ID NO: 5070 - RNA, 20 nt, Artificial Sequence
  SAMD9L targeting guide sequence portion
acugagaaggaccuugcaga

SEQ ID NO: 5071 - RNA, 20 nt, Artificial Sequence
  SAMD9L targeting guide sequence portion
agaaggaccuugcagaaaug

SEQ ID NO: 5072 - RNA, 20 nt, Artificial Sequence
  SAMD9L targeting guide sequence portion
agccccauuucugcaagguc

SEQ ID NO: 5073 - RNA, 20 nt, Artificial Sequence
  SAMD9L targeting guide sequence portion
aggaauuaacugagaaggac

SEQ ID NO: 5074 - RNA, 20 nt, Artificial Sequence
  SAMD9L targeting guide sequence portion
aggaccuugcagaaaugggg

SEQ ID NO: 5075 - RNA, 20 nt, Artificial Sequence
  SAMD9L targeting guide sequence portion
augguagccccauuucugca

SEQ ID NO: 5076 - RNA, 20 nt, Artificial Sequence
  SAMD9L targeting guide sequence portion
auuaacugagaaggaccuug

SEQ ID NO: 5077 - RNA, 20 nt, Artificial Sequence
  SAMD9L targeting guide sequence portion
auuucugcaagguccuucuc

SEQ ID NO: 5078 - RNA, 20 nt, Artificial Sequence
  SAMD9L targeting guide sequence portion
cagaaauggggcuaccaugg

SEQ ID NO: 5079 - RNA, 20 nt, Artificial Sequence
  SAMD9L targeting guide sequence portion
caggaauuaacugagaagga

SEQ ID NO: 5080 - RNA, 20 nt, Artificial Sequence
  SAMD9L targeting guide sequence portion
caugguagccccauuucugc

SEQ ID NO: 5081 - RNA, 20 nt, Artificial Sequence
  SAMD9L targeting guide sequence portion
cauuucugcaagguccuucu

SEQ ID NO: 5082 - RNA, 20 nt, Artificial Sequence
  SAMD9L targeting guide sequence portion
ccaugguagccccauuucug

SEQ ID NO: 5083 - RNA, 20 nt, Artificial Sequence
  SAMD9L targeting guide sequence portion
ccauuucugcaagguccuuc

SEQ ID NO: 5084 - RNA, 20 nt, Artificial Sequence
  SAMD9L targeting guide sequence portion
cccaugguagccccauuucu

SEQ ID NO: 5085 - RNA, 20 nt, Artificial Sequence
  SAMD9L targeting guide sequence portion
cccauuucugcaagguccuu

SEQ ID NO: 5086 - RNA, 20 nt, Artificial Sequence
  SAMD9L targeting guide sequence portion
ccccaugguagccccauuuc

SEQ ID NO: 5087 - RNA, 20 nt, Artificial Sequence
  SAMD9L targeting guide sequence portion
ccccauuucugcaagguccu

SEQ ID NO: 5088 - RNA, 20 nt, Artificial Sequence
  SAMD9L targeting guide sequence portion
ccuugcagaaauggggcuac

SEQ ID NO: 5089 - RNA, 20 nt, Artificial Sequence
  SAMD9L targeting guide sequence portion
cugagaaggaccuugcagaa

SEQ ID NO: 5090 - RNA, 20 nt, Artificial Sequence
  SAMD9L targeting guide sequence portion
cugcaagguccuucucaguu

SEQ ID NO: 5091 - RNA, 20 nt, Artificial Sequence
  SAMD9L targeting guide sequence portion
cuugcagaaauggggcuacc

SEQ ID NO: 5092 - RNA, 20 nt, Artificial Sequence
  SAMD9L targeting guide sequence portion
gaaggaccuugcagaaaugg

SEQ ID NO: 5093 - RNA, 20 nt, Artificial Sequence
  SAMD9L targeting guide sequence portion
gaauuaacugagaaggaccu

SEQ ID NO: 5094 - RNA, 20 nt, Artificial Sequence
  SAMD9L targeting guide sequence portion
gaccccaugguagccccauu

SEQ ID NO: 5095 - RNA, 20 nt, Artificial Sequence
  SAMD9L targeting guide sequence portion
gaccuugcagaaauggggcu

SEQ ID NO: 5096 - RNA, 20 nt, Artificial Sequence
  SAMD9L targeting guide sequence portion
gagaaggaccuugcagaaau

SEQ ID NO: 5097 - RNA, 20 nt, Artificial Sequence
  SAMD9L targeting guide sequence portion
gcaagguccuucucaguuaa

SEQ ID NO: 5098 - RNA, 20 nt, Artificial Sequence
  SAMD9L targeting guide sequence portion
gcagaaauggggcuaccaug

SEQ ID NO: 5099 - RNA, 20 nt, Artificial Sequence
  SAMD9L targeting guide sequence portion
gccccauuucugcaaggucc

SEQ ID NO: 5100 - RNA, 20 nt, Artificial Sequence
  SAMD9L targeting guide sequence portion
ggaauuaacugagaaggacc

SEQ ID NO: 5101 - RNA, 20 nt, Artificial Sequence
  SAMD9L targeting guide sequence portion
ggaccccaugguagccccau

SEQ ID NO: 5102 - RNA, 20 nt, Artificial Sequence
  SAMD9L targeting guide sequence portion
ggaccuugcagaaauggggc

SEQ ID NO: 5103 - RNA, 20 nt, Artificial Sequence
  SAMD9L targeting guide sequence portion
gguagccccauuucugcaag

SEQ ID NO: 5104 - RNA, 20 nt, Artificial Sequence
  SAMD9L targeting guide sequence portion
guagccccauuucugcaagg

SEQ ID NO: 5105 - RNA, 20 nt, Artificial Sequence
  SAMD9L targeting guide sequence portion
uaacugagaaggaccuugca

SEQ ID NO: 5106 - RNA, 20 nt, Artificial Sequence
  SAMD9L targeting guide sequence portion
uagccccauuucugcaaggu

SEQ ID NO: 5107 - RNA, 20 nt, Artificial Sequence
  SAMD9L targeting guide sequence portion
ucugcaagguccuucucagu

SEQ ID NO: 5108 - RNA, 20 nt, Artificial Sequence
  SAMD9L targeting guide sequence portion
ugagaaggaccuugcagaaa

SEQ ID NO: 5109 - RNA, 20 nt, Artificial Sequence
  SAMD9L targeting guide sequence portion
ugcaagguccuucucaguua

SEQ ID NO: 5110 - RNA, 20 nt, Artificial Sequence
  SAMD9L targeting guide sequence portion
ugcagaaauggggcuaccau

SEQ ID NO: 5111 - RNA, 20 nt, Artificial Sequence
  SAMD9L targeting guide sequence portion
uggaccccaugguagcccca

SEQ ID NO: 5112 - RNA, 20 nt, Artificial Sequence
  SAMD9L targeting guide sequence portion
ugguagccccauuucugcaa

SEQ ID NO: 5113 - RNA, 20 nt, Artificial Sequence
  SAMD9L targeting guide sequence portion
uuaacugagaaggaccuugc

SEQ ID NO: 5114 - RNA, 20 nt, Artificial Sequence
  SAMD9L targeting guide sequence portion
uucugcaagguccuucucag

SEQ ID NO: 5115 - RNA, 20 nt, Artificial Sequence
  SAMD9L targeting guide sequence portion
uugcagaaauggggcuacca

SEQ ID NO: 5116 - RNA, 20 nt, Artificial Sequence
  SAMD9L targeting guide sequence portion
uuucugcaagguccuucuca

SEQ ID NO: 5117 - RNA, 21 nt, Artificial Sequence
  SAMD9L targeting guide sequence portion
aacugagaaggaccuugcaga

SEQ ID NO: 5118 - RNA, 21 nt, Artificial Sequence
  SAMD9L targeting guide sequence portion
aaggaccuugcagaaaugggg

SEQ ID NO: 5119 - RNA, 21 nt, Artificial Sequence
  SAMD9L targeting guide sequence portion
aauuaacugagaaggaccuug

SEQ ID NO: 5120 - RNA, 21 nt, Artificial Sequence
  SAMD9L targeting guide sequence portion
accccaugguagccccauuuc

SEQ ID NO: 5121 - RNA, 21 nt, Artificial Sequence
  SAMD9L targeting guide sequence portion
accuugcagaaauggggcuac

SEQ ID NO: 5122 - RNA, 21 nt, Artificial Sequence
  SAMD9L targeting guide sequence portion
acugagaaggaccuugcagaa

SEQ ID NO: 5123 - RNA, 21 nt, Artificial Sequence
  SAMD9L targeting guide sequence portion
agaaggaccuugcagaaaugg

SEQ ID NO: 5124 - RNA, 21 nt, Artificial Sequence
  SAMD9L targeting guide sequence portion
agccccauuucugcaaggucc

SEQ ID NO: 5125 - RNA, 21 nt, Artificial Sequence
  SAMD9L targeting guide sequence portion
aggaauuaacugagaaggacc

SEQ ID NO: 5126 - RNA, 21 nt, Artificial Sequence
  SAMD9L targeting guide sequence portion
aggaccuugcagaaauggggc

SEQ ID NO: 5127 - RNA, 21 nt, Artificial Sequence
  SAMD9L targeting guide sequence portion
augguagccccauuucugcaa

SEQ ID NO: 5128 - RNA, 21 nt, Artificial Sequence
  SAMD9L targeting guide sequence portion
auuaacugagaaggaccuugc

SEQ ID NO: 5129 - RNA, 21 nt, Artificial Sequence
  SAMD9L targeting guide sequence portion
auuucugcaagguccuucuca

SEQ ID NO: 5130 - RNA, 21 nt, Artificial Sequence
  SAMD9L targeting guide sequence portion
cagaaauggggcuaccauggg

SEQ ID NO: 5131 - RNA, 21 nt, Artificial Sequence
  SAMD9L targeting guide sequence portion
caggaauuaacugagaaggac

SEQ ID NO: 5132 - RNA, 21 nt, Artificial Sequence
  SAMD9L targeting guide sequence portion
caugguagccccauuucugca

SEQ ID NO: 5133 - RNA, 21 nt, Artificial Sequence
  SAMD9L targeting guide sequence portion
cauuucugcaagguccuucuc

SEQ ID NO: 5134 - RNA, 21 nt, Artificial Sequence
  SAMD9L targeting guide sequence portion
ccaugguagccccauuucugc

SEQ ID NO: 5135 - RNA, 21 nt, Artificial Sequence
  SAMD9L targeting guide sequence portion
ccauuucugcaagguccuucu

SEQ ID NO: 5136 - RNA, 21 nt, Artificial Sequence
  SAMD9L targeting guide sequence portion
cccaugguagccccauuucug

SEQ ID NO: 5137 - RNA, 21 nt, Artificial Sequence
  SAMD9L targeting guide sequence portion
cccauuucugcaagguccuuc

SEQ ID NO: 5138 - RNA, 21 nt, Artificial Sequence
  SAMD9L targeting guide sequence portion
ccccaugguagccccauuucu

SEQ ID NO: 5139 - RNA, 21 nt, Artificial Sequence
  SAMD9L targeting guide sequence portion
ccccauuucugcaagguccuu

SEQ ID NO: 5140 - RNA, 21 nt, Artificial Sequence
  SAMD9L targeting guide sequence portion
ccuugcagaaauggggcuacc

SEQ ID NO: 5141 - RNA, 21 nt, Artificial Sequence
  SAMD9L targeting guide sequence portion
cugagaaggaccuugcagaaa

SEQ ID NO: 5142 - RNA, 21 nt, Artificial Sequence
  SAMD9L targeting guide sequence portion
cugcaagguccuucucaguua

SEQ ID NO: 5143 - RNA, 21 nt, Artificial Sequence
  SAMD9L targeting guide sequence portion
cuggaccccaugguagcccca

SEQ ID NO: 5144 - RNA, 21 nt, Artificial Sequence
  SAMD9L targeting guide sequence portion
cuugcagaaauggggcuacca

SEQ ID NO: 5145 - RNA, 21 nt, Artificial Sequence
  SAMD9L targeting guide sequence portion
gaaggaccuugcagaaauggg

SEQ ID NO: 5146 - RNA, 21 nt, Artificial Sequence
  SAMD9L targeting guide sequence portion
gaauuaacugagaaggaccuu

SEQ ID NO: 5147 - RNA, 21 nt, Artificial Sequence
  SAMD9L targeting guide sequence portion
gaccccaugguagccccauuu

SEQ ID NO: 5148 - RNA, 21 nt, Artificial Sequence
  SAMD9L targeting guide sequence portion
gaccuugcagaaauggggcua

SEQ ID NO: 5149 - RNA, 21 nt, Artificial Sequence
  SAMD9L targeting guide sequence portion
gagaaggaccuugcagaaaug

SEQ ID NO: 5150 - RNA, 21 nt, Artificial Sequence
  SAMD9L targeting guide sequence portion
gcaagguccuucucaguuaau

SEQ ID NO: 5151 - RNA, 21 nt, Artificial Sequence
  SAMD9L targeting guide sequence portion
gcagaaauggggcuaccaugg

SEQ ID NO: 5152 - RNA, 21 nt, Artificial Sequence
  SAMD9L targeting guide sequence portion
gcaggaauuaacugagaagga

SEQ ID NO: 5153 - RNA, 21 nt, Artificial Sequence
  SAMD9L targeting guide sequence portion
gccccauuucugcaagguccu

SEQ ID NO: 5154 - RNA, 21 nt, Artificial Sequence
  SAMD9L targeting guide sequence portion
ggaauuaacugagaaggaccu

SEQ ID NO: 5155 - RNA, 21 nt, Artificial Sequence
  SAMD9L targeting guide sequence portion
ggaccccaugguagccccauu

SEQ ID NO: 5156 - RNA, 21 nt, Artificial Sequence
  SAMD9L targeting guide sequence portion
ggaccuugcagaaauggggcu

SEQ ID NO: 5157 - RNA, 21 nt, Artificial Sequence
  SAMD9L targeting guide sequence portion
gguagccccauuucugcaagg

SEQ ID NO: 5158 - RNA, 21 nt, Artificial Sequence
  SAMD9L targeting guide sequence portion
guagccccauuucugcaaggu

SEQ ID NO: 5159 - RNA, 21 nt, Artificial Sequence
  SAMD9L targeting guide sequence portion
uaacugagaaggaccuugcag

SEQ ID NO: 5160 - RNA, 21 nt, Artificial Sequence
  SAMD9L targeting guide sequence portion
uagccccauuucugcaagguc

SEQ ID NO: 5161 - RNA, 21 nt, Artificial Sequence
  SAMD9L targeting guide sequence portion
ucugcaagguccuucucaguu

SEQ ID NO: 5162 - RNA, 21 nt, Artificial Sequence
  SAMD9L targeting guide sequence portion
ugagaaggaccuugcagaaau

SEQ ID NO: 5163 - RNA, 21 nt, Artificial Sequence
  SAMD9L targeting guide sequence portion
ugcaagguccuucucaguuaa

SEQ ID NO: 5164 - RNA, 21 nt, Artificial Sequence
  SAMD9L targeting guide sequence portion
ugcagaaauggggcuaccaug

SEQ ID NO: 5165 - RNA, 21 nt, Artificial Sequence
  SAMD9L targeting guide sequence portion
uggaccccaugguagccccau

SEQ ID NO: 5166 - RNA, 21 nt, Artificial Sequence
  SAMD9L targeting guide sequence portion
ugguagccccauuucugcaag

SEQ ID NO: 5167 - RNA, 21 nt, Artificial Sequence
  SAMD9L targeting guide sequence portion
uuaacugagaaggaccuugca

SEQ ID NO: 5168 - RNA, 21 nt, Artificial Sequence
  SAMD9L targeting guide sequence portion
uucugcaagguccuucucagu

SEQ ID NO: 5169 - RNA, 21 nt, Artificial Sequence
  SAMD9L targeting guide sequence portion
uugcagaaauggggcuaccau

SEQ ID NO: 5170 - RNA, 21 nt, Artificial Sequence
  SAMD9L targeting guide sequence portion
uuucugcaagguccuucucag

SEQ ID NO: 5171 - RNA, 22 nt, Artificial Sequence
  SAMD9L targeting guide sequence portion
aacugagaaggaccuugcagaa

SEQ ID NO: 5172 - RNA, 22 nt, Artificial Sequence
  SAMD9L targeting guide sequence portion
aaggaccuugcagaaauggggc

SEQ ID NO: 5173 - RNA, 22 nt, Artificial Sequence
  SAMD9L targeting guide sequence portion
aauuaacugagaaggaccuugc

SEQ ID NO: 5174 - RNA, 22 nt, Artificial Sequence
  SAMD9L targeting guide sequence portion
accccaugguagccccauuucu

SEQ ID NO: 5175 - RNA, 22 nt, Artificial Sequence
  SAMD9L targeting guide sequence portion
accuugcagaaauggggcuacc

SEQ ID NO: 5176 - RNA, 22 nt, Artificial Sequence
  SAMD9L targeting guide sequence portion
acugagaaggaccuugcagaaa

SEQ ID NO: 5177 - RNA, 22 nt, Artificial Sequence
  SAMD9L targeting guide sequence portion
agaaggaccuugcagaaauggg

SEQ ID NO: 5178 - RNA, 22 nt, Artificial Sequence
  SAMD9L targeting guide sequence portion
agccccauuucugcaagguccu

SEQ ID NO: 5179 - RNA, 22 nt, Artificial Sequence
  SAMD9L targeting guide sequence portion
aggaauuaacugagaaggaccu

SEQ ID NO: 5180 - RNA, 22 nt, Artificial Sequence
  SAMD9L targeting guide sequence portion
aggaccuugcagaaauggggcu

SEQ ID NO: 5181 - RNA, 22 nt, Artificial Sequence
  SAMD9L targeting guide sequence portion
augguagccccauuucugcaag

SEQ ID NO: 5182 - RNA, 22 nt, Artificial Sequence
  SAMD9L targeting guide sequence portion
auuaacugagaaggaccuugca

SEQ ID NO: 5183 - RNA, 22 nt, Artificial Sequence
  SAMD9L targeting guide sequence portion
auuucugcaagguccuucucag

SEQ ID NO: 5184 - RNA, 22 nt, Artificial Sequence
  SAMD9L targeting guide sequence portion
cagaaauggggcuaccaugggg

SEQ ID NO: 5185 - RNA, 22 nt, Artificial Sequence
  SAMD9L targeting guide sequence portion
caggaauuaacugagaaggacc

SEQ ID NO: 5186 - RNA, 22 nt, Artificial Sequence
  SAMD9L targeting guide sequence portion
caugguagccccauuucugcaa

SEQ ID NO: 5187 - RNA, 22 nt, Artificial Sequence
  SAMD9L targeting guide sequence portion
cauuucugcaagguccuucuca

SEQ ID NO: 5188 - RNA, 22 nt, Artificial Sequence
  SAMD9L targeting guide sequence portion
ccaugguagccccauuucugca

SEQ ID NO: 5189 - RNA, 22 nt, Artificial Sequence
  SAMD9L targeting guide sequence portion
ccauuucugcaagguccuucuc

SEQ ID NO: 5190 - RNA, 22 nt, Artificial Sequence
  SAMD9L targeting guide sequence portion
cccaugguagccccauuucugc

SEQ ID NO: 5191 - RNA, 22 nt, Artificial Sequence
  SAMD9L targeting guide sequence portion
cccauuucugcaagguccuucu

SEQ ID NO: 5192 - RNA, 22 nt, Artificial Sequence
  SAMD9L targeting guide sequence portion
ccccaugguagccccauuucug

SEQ ID NO: 5193 - RNA, 22 nt, Artificial Sequence
  SAMD9L targeting guide sequence portion
ccccauuucugcaagguccuuc

SEQ ID NO: 5194 - RNA, 22 nt, Artificial Sequence
  SAMD9L targeting guide sequence portion
ccuugcagaaauggggcuacca

SEQ ID NO: 5195 - RNA, 22 nt, Artificial Sequence
  SAMD9L targeting guide sequence portion
cugagaaggaccuugcagaaau

SEQ ID NO: 5196 - RNA, 22 nt, Artificial Sequence
  SAMD9L targeting guide sequence portion
cugcaagguccuucucaguuaa

SEQ ID NO: 5197 - RNA, 22 nt, Artificial Sequence
  SAMD9L targeting guide sequence portion
cuggaccccaugguagccccau

SEQ ID NO: 5198 - RNA, 22 nt, Artificial Sequence
  SAMD9L targeting guide sequence portion
cuugcagaaauggggcuaccau

SEQ ID NO: 5199 - RNA, 22 nt, Artificial Sequence
  SAMD9L targeting guide sequence portion
gaaggaccuugcagaaaugggg

SEQ ID NO: 5200 - RNA, 22 nt, Artificial Sequence
  SAMD9L targeting guide sequence portion
gaauuaacugagaaggaccuug

SEQ ID NO: 5201 - RNA, 22 nt, Artificial Sequence
  SAMD9L targeting guide sequence portion
gaccccaugguagccccauuuc

SEQ ID NO: 5202 - RNA, 22 nt, Artificial Sequence
  SAMD9L targeting guide sequence portion
gaccuugcagaaauggggcuac

SEQ ID NO: 5203 - RNA, 22 nt, Artificial Sequence
  SAMD9L targeting guide sequence portion
gagaaggaccuugcagaaaugg

SEQ ID NO: 5204 - RNA, 22 nt, Artificial Sequence
  SAMD9L targeting guide sequence portion
gcaagguccuucucaguuaauu

SEQ ID NO: 5205 - RNA, 22 nt, Artificial Sequence
  SAMD9L targeting guide sequence portion
gcagaaauggggcuaccauggg

SEQ ID NO: 5206 - RNA, 22 nt, Artificial Sequence
  SAMD9L targeting guide sequence portion
gcaggaauuaacugagaaggac

SEQ ID NO: 5207 - RNA, 22 nt, Artificial Sequence
  SAMD9L targeting guide sequence portion
gccccauuucugcaagguccuu

SEQ ID NO: 5208 - RNA, 22 nt, Artificial Sequence
  SAMD9L targeting guide sequence portion
gcuggaccccaugguagcccca

SEQ ID NO: 5209 - RNA, 22 nt, Artificial Sequence
  SAMD9L targeting guide sequence portion
ggaauuaacugagaaggaccuu

SEQ ID NO: 5210 - RNA, 22 nt, Artificial Sequence
  SAMD9L targeting guide sequence portion
ggaccccaugguagccccauuu

SEQ ID NO: 5211 - RNA, 22 nt, Artificial Sequence
  SAMD9L targeting guide sequence portion
ggaccuugcagaaauggggcua

SEQ ID NO: 5212 - RNA, 22 nt, Artificial Sequence
  SAMD9L targeting guide sequence portion
gguagccccauuucugcaaggu

SEQ ID NO: 5213 - RNA, 22 nt, Artificial Sequence
  SAMD9L targeting guide sequence portion
guagccccauuucugcaagguc

SEQ ID NO: 5214 - RNA, 22 nt, Artificial Sequence
  SAMD9L targeting guide sequence portion
uaacugagaaggaccuugcaga

SEQ ID NO: 5215 - RNA, 22 nt, Artificial Sequence
  SAMD9L targeting guide sequence portion
uagccccauuucugcaaggucc

SEQ ID NO: 5216 - RNA, 22 nt, Artificial Sequence
  SAMD9L targeting guide sequence portion
ucugcaagguccuucucaguua

SEQ ID NO: 5217 - RNA, 22 nt, Artificial Sequence
  SAMD9L targeting guide sequence portion
ugagaaggaccuugcagaaaug

SEQ ID NO: 5218 - RNA, 22 nt, Artificial Sequence
  SAMD9L targeting guide sequence portion
ugcaagguccuucucaguuaau

SEQ ID NO: 5219 - RNA, 22 nt, Artificial Sequence
  SAMD9L targeting guide sequence portion
ugcagaaauggggcuaccaugg

SEQ ID NO: 5220 - RNA, 22 nt, Artificial Sequence
  SAMD9L targeting guide sequence portion
ugcaggaauuaacugagaagga

SEQ ID NO: 5221 - RNA, 22 nt, Artificial Sequence
  SAMD9L targeting guide sequence portion
uggaccccaugguagccccauu

SEQ ID NO: 5222 - RNA, 22 nt, Artificial Sequence
  SAMD9L targeting guide sequence portion
ugguagccccauuucugcaagg

SEQ ID NO: 5223 - RNA, 22 nt, Artificial Sequence
  SAMD9L targeting guide sequence portion
uuaacugagaaggaccuugcag

SEQ ID NO: 5224 - RNA, 22 nt, Artificial Sequence
  SAMD9L targeting guide sequence portion
uucugcaagguccuucucaguu

SEQ ID NO: 5225 - RNA, 22 nt, Artificial Sequence
  SAMD9L targeting guide sequence portion
uugcagaaauggggcuaccaug

SEQ ID NO: 5226 - RNA, 22 nt, Artificial Sequence
  SAMD9L targeting guide sequence portion
uuucugcaagguccuucucagu

SEQ ID NO: 5227 - RNA, 20 nt, Artificial Sequence
  SAMD9L targeting guide sequence portion
aaaguacugagaaggaccuu

SEQ ID NO: 5228 - RNA, 20 nt, Artificial Sequence
  SAMD9L targeting guide sequence portion
aacaggauuaguccugcagg

SEQ ID NO: 5229 - RNA, 20 nt, Artificial Sequence
  SAMD9L targeting guide sequence portion
aagguccuucucaguacuuu

SEQ ID NO: 5230 - RNA, 20 nt, Artificial Sequence
  SAMD9L targeting guide sequence portion
aaguacugagaaggaccuug

SEQ ID NO: 5231 - RNA, 20 nt, Artificial Sequence
  SAMD9L targeting guide sequence portion
acaagguccuucucaguacu

SEQ ID NO: 5232 - RNA, 20 nt, Artificial Sequence
  SAMD9L targeting guide sequence portion
acaggauuaguccugcagga

SEQ ID NO: 5233 - RNA, 20 nt, Artificial Sequence
  SAMD9L targeting guide sequence portion
acuuuccugcaggacuaauc

SEQ ID NO: 5234 - RNA, 20 nt, Artificial Sequence
  SAMD9L targeting guide sequence portion
aggaaaguacugagaaggac

SEQ ID NO: 5235 - RNA, 20 nt, Artificial Sequence
  SAMD9L targeting guide sequence portion
aggauuaguccugcaggaaa

SEQ ID NO: 5236 - RNA, 20 nt, Artificial Sequence
  SAMD9L targeting guide sequence portion
agguccuucucaguacuuuc

SEQ ID NO: 5237 - RNA, 20 nt, Artificial Sequence
  SAMD9L targeting guide sequence portion
aguacugagaaggaccuugu

SEQ ID NO: 5238 - RNA, 20 nt, Artificial Sequence
  SAMD9L targeting guide sequence portion
aguacuuuccugcaggacua

SEQ ID NO: 5239 - RNA, 20 nt, Artificial Sequence
  SAMD9L targeting guide sequence portion
aguccugcaggaaaguacug

SEQ ID NO: 5240 - RNA, 20 nt, Artificial Sequence
  SAMD9L targeting guide sequence portion
auuaguccugcaggaaagua

SEQ ID NO: 5241 - RNA, 20 nt, Artificial Sequence
  SAMD9L targeting guide sequence portion
auuucuacaagguccuucuc

SEQ ID NO: 5242 - RNA, 20 nt, Artificial Sequence
  SAMD9L targeting guide sequence portion
caagguccuucucaguacuu

SEQ ID NO: 5243 - RNA, 20 nt, Artificial Sequence
  SAMD9L targeting guide sequence portion
caggaaaguacugagaagga

SEQ ID NO: 5244 - RNA, 20 nt, Artificial Sequence
  SAMD9L targeting guide sequence portion
caggauuaguccugcaggaa

SEQ ID NO: 5245 - RNA, 20 nt, Artificial Sequence
  SAMD9L targeting guide sequence portion
caguacuuuccugcaggacu

SEQ ID NO: 5246 - RNA, 20 nt, Artificial Sequence
  SAMD9L targeting guide sequence portion
cauuucuacaagguccuucu

SEQ ID NO: 5247 - RNA, 20 nt, Artificial Sequence
  SAMD9L targeting guide sequence portion
ccauuucuacaagguccuuc

SEQ ID NO: 5248 - RNA, 20 nt, Artificial Sequence
  SAMD9L targeting guide sequence portion
ccugcaggaaaguacugaga

SEQ ID NO: 5249 - RNA, 20 nt, Artificial Sequence
  SAMD9L targeting guide sequence portion
ccuucucaguacuuuccugc

SEQ ID NO: 5250 - RNA, 20 nt, Artificial Sequence
  SAMD9L targeting guide sequence portion
cuacaagguccuucucagua

SEQ ID NO: 5251 - RNA, 20 nt, Artificial Sequence
  SAMD9L targeting guide sequence portion
cucaguacuuuccugcagga

SEQ ID NO: 5252 - RNA, 20 nt, Artificial Sequence
  SAMD9L targeting guide sequence portion
cugcaggaaaguacugagaa

SEQ ID NO: 5253 - RNA, 20 nt, Artificial Sequence
  SAMD9L targeting guide sequence portion
cuucucaguacuuuccugca

SEQ ID NO: 5254 - RNA, 20 nt, Artificial Sequence
  SAMD9L targeting guide sequence portion
gaaaguacugagaaggaccu

SEQ ID NO: 5255 - RNA, 20 nt, Artificial Sequence
  SAMD9L targeting guide sequence portion
gauuaguccugcaggaaagu

SEQ ID NO: 5256 - RNA, 20 nt, Artificial Sequence
  SAMD9L targeting guide sequence portion
gcaggaaaguacugagaagg

SEQ ID NO: 5257 - RNA, 20 nt, Artificial Sequence
  SAMD9L targeting guide sequence portion
ggaaaguacugagaaggacc

SEQ ID NO: 5258 - RNA, 20 nt, Artificial Sequence
  SAMD9L targeting guide sequence portion
ggauuaguccugcaggaaag

SEQ ID NO: 5259 - RNA, 20 nt, Artificial Sequence
  SAMD9L targeting guide sequence portion
gguccuucucaguacuuucc

SEQ ID NO: 5260 - RNA, 20 nt, Artificial Sequence
  SAMD9L targeting guide sequence portion
guacugagaaggaccuugua

SEQ ID NO: 5261 - RNA, 20 nt, Artificial Sequence
  SAMD9L targeting guide sequence portion
guacuuuccugcaggacuaa

SEQ ID NO: 5262 - RNA, 20 nt, Artificial Sequence
  SAMD9L targeting guide sequence portion
guccugcaggaaaguacuga

SEQ ID NO: 5263 - RNA, 20 nt, Artificial Sequence
  SAMD9L targeting guide sequence portion
guccuucucaguacuuuccu

SEQ ID NO: 5264 - RNA, 20 nt, Artificial Sequence
  SAMD9L targeting guide sequence portion
uaacaggauuaguccugcag

SEQ ID NO: 5265 - RNA, 20 nt, Artificial Sequence
  SAMD9L targeting guide sequence portion
uacaagguccuucucaguac

SEQ ID NO: 5266 - RNA, 20 nt, Artificial Sequence
  SAMD9L targeting guide sequence portion
uacugagaaggaccuuguag

SEQ ID NO: 5267 - RNA, 20 nt, Artificial Sequence
  SAMD9L targeting guide sequence portion
uacuuuccugcaggacuaau

SEQ ID NO: 5268 - RNA, 20 nt, Artificial Sequence
  SAMD9L targeting guide sequence portion
uaguccugcaggaaaguacu

SEQ ID NO: 5269 - RNA, 20 nt, Artificial Sequence
  SAMD9L targeting guide sequence portion
ucaguacuuuccugcaggac

SEQ ID NO: 5270 - RNA, 20 nt, Artificial Sequence
  SAMD9L targeting guide sequence portion
uccugcaggaaaguacugag

SEQ ID NO: 5271 - RNA, 20 nt, Artificial Sequence
  SAMD9L targeting guide sequence portion
uccuucucaguacuuuccug

SEQ ID NO: 5272 - RNA, 20 nt, Artificial Sequence
  SAMD9L targeting guide sequence portion
ucuacaagguccuucucagu

SEQ ID NO: 5273 - RNA, 20 nt, Artificial Sequence
  SAMD9L targeting guide sequence portion
ucucaguacuuuccugcagg

SEQ ID NO: 5274 - RNA, 20 nt, Artificial Sequence
  SAMD9L targeting guide sequence portion
ugcaggaaaguacugagaag

SEQ ID NO: 5275 - RNA, 20 nt, Artificial Sequence
  SAMD9L targeting guide sequence portion
uuaguccugcaggaaaguac

SEQ ID NO: 5276 - RNA, 20 nt, Artificial Sequence
  SAMD9L targeting guide sequence portion
uucuacaagguccuucucag

SEQ ID NO: 5277 - RNA, 20 nt, Artificial Sequence
  SAMD9L targeting guide sequence portion
uucucaguacuuuccugcag

SEQ ID NO: 5278 - RNA, 20 nt, Artificial Sequence
  SAMD9L targeting guide sequence portion
uuucuacaagguccuucuca

SEQ ID NO: 5279 - RNA, 21 nt, Artificial Sequence
  SAMD9L targeting guide sequence portion
aaaguacugagaaggaccuug

SEQ ID NO: 5280 - RNA, 21 nt, Artificial Sequence
  SAMD9L targeting guide sequence portion
aacaggauuaguccugcagga

SEQ ID NO: 5281 - RNA, 21 nt, Artificial Sequence
  SAMD9L targeting guide sequence portion
aagguccuucucaguacuuuc

SEQ ID NO: 5282 - RNA, 21 nt, Artificial Sequence
  SAMD9L targeting guide sequence portion
aaguacugagaaggaccuugu

SEQ ID NO: 5283 - RNA, 21 nt, Artificial Sequence
  SAMD9L targeting guide sequence portion
acaagguccuucucaguacuu

SEQ ID NO: 5284 - RNA, 21 nt, Artificial Sequence
  SAMD9L targeting guide sequence portion
acaggauuaguccugcaggaa

SEQ ID NO: 5285 - RNA, 21 nt, Artificial Sequence
  SAMD9L targeting guide sequence portion
acuuuccugcaggacuaaucc

SEQ ID NO: 5286 - RNA, 21 nt, Artificial Sequence
  SAMD9L targeting guide sequence portion
aggaaaguacugagaaggacc

SEQ ID NO: 5287 - RNA, 21 nt, Artificial Sequence
  SAMD9L targeting guide sequence portion
aggauuaguccugcaggaaag

SEQ ID NO: 5288 - RNA, 21 nt, Artificial Sequence
  SAMD9L targeting guide sequence portion
agguccuucucaguacuuucc

SEQ ID NO: 5289 - RNA, 21 nt, Artificial Sequence
  SAMD9L targeting guide sequence portion
aguacugagaaggaccuugua

SEQ ID NO: 5290 - RNA, 21 nt, Artificial Sequence
  SAMD9L targeting guide sequence portion
aguacuuuccugcaggacuaa

SEQ ID NO: 5291 - RNA, 21 nt, Artificial Sequence
  SAMD9L targeting guide sequence portion
aguccugcaggaaaguacuga

SEQ ID NO: 5292 - RNA, 21 nt, Artificial Sequence
  SAMD9L targeting guide sequence portion
auuaguccugcaggaaaguac

SEQ ID NO: 5293 - RNA, 21 nt, Artificial Sequence
  SAMD9L targeting guide sequence portion
auuucuacaagguccuucuca

SEQ ID NO: 5294 - RNA, 21 nt, Artificial Sequence
  SAMD9L targeting guide sequence portion
caagguccuucucaguacuuu

SEQ ID NO: 5295 - RNA, 21 nt, Artificial Sequence
  SAMD9L targeting guide sequence portion
caggaaaguacugagaaggac

SEQ ID NO: 5296 - RNA, 21 nt, Artificial Sequence
  SAMD9L targeting guide sequence portion
caggauuaguccugcaggaaa

SEQ ID NO: 5297 - RNA, 21 nt, Artificial Sequence
  SAMD9L targeting guide sequence portion
caguacuuuccugcaggacua

SEQ ID NO: 5298 - RNA, 21 nt, Artificial Sequence
  SAMD9L targeting guide sequence portion
cauuucuacaagguccuucuc

SEQ ID NO: 5299 - RNA, 21 nt, Artificial Sequence
  SAMD9L targeting guide sequence portion
ccauuucuacaagguccuucu

SEQ ID NO: 5300 - RNA, 21 nt, Artificial Sequence
  SAMD9L targeting guide sequence portion
cccauuucuacaagguccuuc

SEQ ID NO: 5301 - RNA, 21 nt, Artificial Sequence
  SAMD9L targeting guide sequence portion
ccugcaggaaaguacugagaa

SEQ ID NO: 5302 - RNA, 21 nt, Artificial Sequence
  SAMD9L targeting guide sequence portion
ccuucucaguacuuuccugca

SEQ ID NO: 5303 - RNA, 21 nt, Artificial Sequence
  SAMD9L targeting guide sequence portion
cuacaagguccuucucaguac

SEQ ID NO: 5304 - RNA, 21 nt, Artificial Sequence
  SAMD9L targeting guide sequence portion
cucaguacuuuccugcaggac

SEQ ID NO: 5305 - RNA, 21 nt, Artificial Sequence
  SAMD9L targeting guide sequence portion
cugcaggaaaguacugagaag

SEQ ID NO: 5306 - RNA, 21 nt, Artificial Sequence
  SAMD9L targeting guide sequence portion
cuucucaguacuuuccugcag

SEQ ID NO: 5307 - RNA, 21 nt, Artificial Sequence
  SAMD9L targeting guide sequence portion
gaaaguacugagaaggaccuu

SEQ ID NO: 5308 - RNA, 21 nt, Artificial Sequence
  SAMD9L targeting guide sequence portion
gauuaguccugcaggaaagua

SEQ ID NO: 5309 - RNA, 21 nt, Artificial Sequence
  SAMD9L targeting guide sequence portion
gcaggaaaguacugagaagga

SEQ ID NO: 5310 - RNA, 21 nt, Artificial Sequence
  SAMD9L targeting guide sequence portion
ggaaaguacugagaaggaccu

SEQ ID NO: 5311 - RNA, 21 nt, Artificial Sequence
  SAMD9L targeting guide sequence portion
ggauuaguccugcaggaaagu

SEQ ID NO: 5312 - RNA, 21 nt, Artificial Sequence
  SAMD9L targeting guide sequence portion
gguccuucucaguacuuuccu

SEQ ID NO: 5313 - RNA, 21 nt, Artificial Sequence
  SAMD9L targeting guide sequence portion
guaacaggauuaguccugcag

SEQ ID NO: 5314 - RNA, 21 nt, Artificial Sequence
  SAMD9L targeting guide sequence portion
guacugagaaggaccuuguag

SEQ ID NO: 5315 - RNA, 21 nt, Artificial Sequence
  SAMD9L targeting guide sequence portion
guacuuuccugcaggacuaau

SEQ ID NO: 5316 - RNA, 21 nt, Artificial Sequence
  SAMD9L targeting guide sequence portion
guccugcaggaaaguacugag

SEQ ID NO: 5317 - RNA, 21 nt, Artificial Sequence
  SAMD9L targeting guide sequence portion
guccuucucaguacuuuccug

SEQ ID NO: 5318 - RNA, 21 nt, Artificial Sequence
  SAMD9L targeting guide sequence portion
uaacaggauuaguccugcagg

SEQ ID NO: 5319 - RNA, 21 nt, Artificial Sequence
  SAMD9L targeting guide sequence portion
uacaagguccuucucaguacu

SEQ ID NO: 5320 - RNA, 21 nt, Artificial Sequence
  SAMD9L targeting guide sequence portion
uacugagaaggaccuuguaga

SEQ ID NO: 5321 - RNA, 21 nt, Artificial Sequence
  SAMD9L targeting guide sequence portion
uacuuuccugcaggacuaauc

SEQ ID NO: 5322 - RNA, 21 nt, Artificial Sequence
  SAMD9L targeting guide sequence portion
uaguccugcaggaaaguacug

SEQ ID NO: 5323 - RNA, 21 nt, Artificial Sequence
  SAMD9L targeting guide sequence portion
ucaguacuuuccugcaggacu

SEQ ID NO: 5324 - RNA, 21 nt, Artificial Sequence
  SAMD9L targeting guide sequence portion
uccugcaggaaaguacugaga

SEQ ID NO: 5325 - RNA, 21 nt, Artificial Sequence
  SAMD9L targeting guide sequence portion
uccuucucaguacuuuccugc

SEQ ID NO: 5326 - RNA, 21 nt, Artificial Sequence
  SAMD9L targeting guide sequence portion
ucuacaagguccuucucagua

SEQ ID NO: 5327 - RNA, 21 nt, Artificial Sequence
  SAMD9L targeting guide sequence portion
ucucaguacuuuccugcagga

SEQ ID NO: 5328 - RNA, 21 nt, Artificial Sequence
  SAMD9L targeting guide sequence portion
ugcaggaaaguacugagaagg

SEQ ID NO: 5329 - RNA, 21 nt, Artificial Sequence
  SAMD9L targeting guide sequence portion
uuaguccugcaggaaaguacu

SEQ ID NO: 5330 - RNA, 21 nt, Artificial Sequence
  SAMD9L targeting guide sequence portion
uucuacaagguccuucucagu

SEQ ID NO: 5331 - RNA, 21 nt, Artificial Sequence
  SAMD9L targeting guide sequence portion
uucucaguacuuuccugcagg

SEQ ID NO: 5332 - RNA, 21 nt, Artificial Sequence
  SAMD9L targeting guide sequence portion
uuucuacaagguccuucucag

SEQ ID NO: 5333 - RNA, 22 nt, Artificial Sequence
  SAMD9L targeting guide sequence portion
aaaguacugagaaggaccuugu

SEQ ID NO: 5334 - RNA, 22 nt, Artificial Sequence
  SAMD9L targeting guide sequence portion
aacaggauuaguccugcaggaa

SEQ ID NO: 5335 - RNA, 22 nt, Artificial Sequence
  SAMD9L targeting guide sequence portion
aagguccuucucaguacuuucc

SEQ ID NO: 5336 - RNA, 22 nt, Artificial Sequence
  SAMD9L targeting guide sequence portion
aaguacugagaaggaccuugua

SEQ ID NO: 5337 - RNA, 22 nt, Artificial Sequence
  SAMD9L targeting guide sequence portion
acaagguccuucucaguacuuu

SEQ ID NO: 5338 - RNA, 22 nt, Artificial Sequence
  SAMD9L targeting guide sequence portion
acaggauuaguccugcaggaaa

SEQ ID NO: 5339 - RNA, 22 nt, Artificial Sequence
  SAMD9L targeting guide sequence portion
acuuuccugcaggacuaauccu

SEQ ID NO: 5340 - RNA, 22 nt, Artificial Sequence
  SAMD9L targeting guide sequence portion
aggaaaguacugagaaggaccu

SEQ ID NO: 5341 - RNA, 22 nt, Artificial Sequence
  SAMD9L targeting guide sequence portion
aggauuaguccugcaggaaagu

SEQ ID NO: 5342 - RNA, 22 nt, Artificial Sequence
  SAMD9L targeting guide sequence portion
agguccuucucaguacuuuccu

SEQ ID NO: 5343 - RNA, 22 nt, Artificial Sequence
  SAMD9L targeting guide sequence portion
aguaacaggauuaguccugcag

SEQ ID NO: 5344 - RNA, 22 nt, Artificial Sequence
  SAMD9L targeting guide sequence portion
aguacugagaaggaccuuguag

SEQ ID NO: 5345 - RNA, 22 nt, Artificial Sequence
  SAMD9L targeting guide sequence portion
aguacuuuccugcaggacuaau

SEQ ID NO: 5346 - RNA, 22 nt, Artificial Sequence
  SAMD9L targeting guide sequence portion
aguccugcaggaaaguacugag

SEQ ID NO: 5347 - RNA, 22 nt, Artificial Sequence
  SAMD9L targeting guide sequence portion
auuaguccugcaggaaaguacu

SEQ ID NO: 5348 - RNA, 22 nt, Artificial Sequence
  SAMD9L targeting guide sequence portion
auuucuacaagguccuucucag

SEQ ID NO: 5349 - RNA, 22 nt, Artificial Sequence
  SAMD9L targeting guide sequence portion
caagguccuucucaguacuuuc

SEQ ID NO: 5350 - RNA, 22 nt, Artificial Sequence
  SAMD9L targeting guide sequence portion
caggaaaguacugagaaggacc

SEQ ID NO: 5351 - RNA, 22 nt, Artificial Sequence
  SAMD9L targeting guide sequence portion
caggauuaguccugcaggaaag

SEQ ID NO: 5352 - RNA, 22 nt, Artificial Sequence
  SAMD9L targeting guide sequence portion
caguacuuuccugcaggacuaa

SEQ ID NO: 5353 - RNA, 22 nt, Artificial Sequence
  SAMD9L targeting guide sequence portion
cauuucuacaagguccuucuca

SEQ ID NO: 5354 - RNA, 22 nt, Artificial Sequence
  SAMD9L targeting guide sequence portion
ccauuucuacaagguccuucuc

SEQ ID NO: 5355 - RNA, 22 nt, Artificial Sequence
  SAMD9L targeting guide sequence portion
cccauuucuacaagguccuucu

SEQ ID NO: 5356 - RNA, 22 nt, Artificial Sequence
  SAMD9L targeting guide sequence portion
ccccauuucuacaagguccuuc

SEQ ID NO: 5357 - RNA, 22 nt, Artificial Sequence
  SAMD9L targeting guide sequence portion
ccugcaggaaaguacugagaag

SEQ ID NO: 5358 - RNA, 22 nt, Artificial Sequence
  SAMD9L targeting guide sequence portion
ccuucucaguacuuuccugcag

SEQ ID NO: 5359 - RNA, 22 nt, Artificial Sequence
  SAMD9L targeting guide sequence portion
cuacaagguccuucucaguacu

SEQ ID NO: 5360 - RNA, 22 nt, Artificial Sequence
  SAMD9L targeting guide sequence portion
cucaguacuuuccugcaggacu

SEQ ID NO: 5361 - RNA, 22 nt, Artificial Sequence
  SAMD9L targeting guide sequence portion
cugcaggaaaguacugagaagg

SEQ ID NO: 5362 - RNA, 22 nt, Artificial Sequence
  SAMD9L targeting guide sequence portion
cuucucaguacuuuccugcagg

SEQ ID NO: 5363 - RNA, 22 nt, Artificial Sequence
  SAMD9L targeting guide sequence portion
gaaaguacugagaaggaccuug

SEQ ID NO: 5364 - RNA, 22 nt, Artificial Sequence
  SAMD9L targeting guide sequence portion
gauuaguccugcaggaaaguac

SEQ ID NO: 5365 - RNA, 22 nt, Artificial Sequence
  SAMD9L targeting guide sequence portion
gcaggaaaguacugagaaggac

SEQ ID NO: 5366 - RNA, 22 nt, Artificial Sequence
  SAMD9L targeting guide sequence portion
ggaaaguacugagaaggaccuu

SEQ ID NO: 5367 - RNA, 22 nt, Artificial Sequence
  SAMD9L targeting guide sequence portion
ggauuaguccugcaggaaagua

SEQ ID NO: 5368 - RNA, 22 nt, Artificial Sequence
  SAMD9L targeting guide sequence portion
gguccuucucaguacuuuccug

SEQ ID NO: 5369 - RNA, 22 nt, Artificial Sequence
  SAMD9L targeting guide sequence portion
guaacaggauuaguccugcagg

SEQ ID NO: 5370 - RNA, 22 nt, Artificial Sequence
  SAMD9L targeting guide sequence portion
guacugagaaggaccuuguaga

SEQ ID NO: 5371 - RNA, 22 nt, Artificial Sequence
  SAMD9L targeting guide sequence portion
guacuuuccugcaggacuaauc

SEQ ID NO: 5372 - RNA, 22 nt, Artificial Sequence
  SAMD9L targeting guide sequence portion
guccugcaggaaaguacugaga

SEQ ID NO: 5373 - RNA, 22 nt, Artificial Sequence
  SAMD9L targeting guide sequence portion
guccuucucaguacuuuccugc

SEQ ID NO: 5374 - RNA, 22 nt, Artificial Sequence
  SAMD9L targeting guide sequence portion
uaacaggauuaguccugcagga

SEQ ID NO: 5375 - RNA, 22 nt, Artificial Sequence
  SAMD9L targeting guide sequence portion
uacaagguccuucucaguacuu

SEQ ID NO: 5376 - RNA, 22 nt, Artificial Sequence
  SAMD9L targeting guide sequence portion
uacugagaaggaccuuguagaa

SEQ ID NO: 5377 - RNA, 22 nt, Artificial Sequence
  SAMD9L targeting guide sequence portion
uacuuuccugcaggacuaaucc

SEQ ID NO: 5378 - RNA, 22 nt, Artificial Sequence
  SAMD9L targeting guide sequence portion
uaguccugcaggaaaguacuga

SEQ ID NO: 5379 - RNA, 22 nt, Artificial Sequence
  SAMD9L targeting guide sequence portion
ucaguacuuuccugcaggacua

SEQ ID NO: 5380 - RNA, 22 nt, Artificial Sequence
  SAMD9L targeting guide sequence portion
uccugcaggaaaguacugagaa

SEQ ID NO: 5381 - RNA, 22 nt, Artificial Sequence
  SAMD9L targeting guide sequence portion
uccuucucaguacuuuccugca

SEQ ID NO: 5382 - RNA, 22 nt, Artificial Sequence
  SAMD9L targeting guide sequence portion
ucuacaagguccuucucaguac

SEQ ID NO: 5383 - RNA, 22 nt, Artificial Sequence
  SAMD9L targeting guide sequence portion
ucucaguacuuuccugcaggac

SEQ ID NO: 5384 - RNA, 22 nt, Artificial Sequence
  SAMD9L targeting guide sequence portion
ugcaggaaaguacugagaagga

SEQ ID NO: 5385 - RNA, 22 nt, Artificial Sequence
  SAMD9L targeting guide sequence portion
uuaguccugcaggaaaguacug

SEQ ID NO: 5386 - RNA, 22 nt, Artificial Sequence
  SAMD9L targeting guide sequence portion
uucuacaagguccuucucagua

SEQ ID NO: 5387 - RNA, 22 nt, Artificial Sequence
  SAMD9L targeting guide sequence portion
uucucaguacuuuccugcagga

SEQ ID NO: 5388 - RNA, 22 nt, Artificial Sequence
  SAMD9L targeting guide sequence portion
uuucuacaagguccuucucagu

SEQ ID NO: 5389 - RNA, 20 nt, Artificial Sequence
  SAMD9L targeting guide sequence portion
aaagcacugagaaggaccuu

SEQ ID NO: 5390 - RNA, 20 nt, Artificial Sequence
  SAMD9L targeting guide sequence portion
aagcacugagaaggaccuug

SEQ ID NO: 5391 - RNA, 20 nt, Artificial Sequence
  SAMD9L targeting guide sequence portion
aagguccuucucagugcuuu

SEQ ID NO: 5392 - RNA, 20 nt, Artificial Sequence
  SAMD9L targeting guide sequence portion
acaagguccuucucagugcu

SEQ ID NO: 5393 - RNA, 20 nt, Artificial Sequence
  SAMD9L targeting guide sequence portion
agcacugagaaggaccuugu

SEQ ID NO: 5394 - RNA, 20 nt, Artificial Sequence
  SAMD9L targeting guide sequence portion
aggaaagcacugagaaggac

SEQ ID NO: 5395 - RNA, 20 nt, Artificial Sequence
  SAMD9L targeting guide sequence portion
agguccuucucagugcuuuc

SEQ ID NO: 5396 - RNA, 20 nt, Artificial Sequence
  SAMD9L targeting guide sequence portion
aguccugcaggaaagcacug

SEQ ID NO: 5397 - RNA, 20 nt, Artificial Sequence
  SAMD9L targeting guide sequence portion
agugcuuuccugcaggacua

SEQ ID NO: 5398 - RNA, 20 nt, Artificial Sequence
  SAMD9L targeting guide sequence portion
auuaguccugcaggaaagca

SEQ ID NO: 5399 - RNA, 20 nt, Artificial Sequence
  SAMD9L targeting guide sequence portion
caagguccuucucagugcuu

SEQ ID NO: 5400 - RNA, 20 nt, Artificial Sequence
  SAMD9L targeting guide sequence portion
cacugagaaggaccuuguag

SEQ ID NO: 5401 - RNA, 20 nt, Artificial Sequence
  SAMD9L targeting guide sequence portion
caggaaagcacugagaagga

SEQ ID NO: 5402 - RNA, 20 nt, Artificial Sequence
  SAMD9L targeting guide sequence portion
cagugcuuuccugcaggacu

SEQ ID NO: 5403 - RNA, 20 nt, Artificial Sequence
  SAMD9L targeting guide sequence portion
ccugcaggaaagcacugaga

SEQ ID NO: 5404 - RNA, 20 nt, Artificial Sequence
  SAMD9L targeting guide sequence portion
ccuucucagugcuuuccugc

SEQ ID NO: 5405 - RNA, 20 nt, Artificial Sequence
  SAMD9L targeting guide sequence portion
cuacaagguccuucucagug

SEQ ID NO: 5406 - RNA, 20 nt, Artificial Sequence
  SAMD9L targeting guide sequence portion
cucagugcuuuccugcagga

SEQ ID NO: 5407 - RNA, 20 nt, Artificial Sequence
  SAMD9L targeting guide sequence portion
cugcaggaaagcacugagaa

SEQ ID NO: 5408 - RNA, 20 nt, Artificial Sequence
  SAMD9L targeting guide sequence portion
cuucucagugcuuuccugca

SEQ ID NO: 5409 - RNA, 20 nt, Artificial Sequence
  SAMD9L targeting guide sequence portion
gaaagcacugagaaggaccu

SEQ ID NO: 5410 - RNA, 20 nt, Artificial Sequence
  SAMD9L targeting guide sequence portion
gauuaguccugcaggaaagc

SEQ ID NO: 5411 - RNA, 20 nt, Artificial Sequence
  SAMD9L targeting guide sequence portion
gcacugagaaggaccuugua

SEQ ID NO: 5412 - RNA, 20 nt, Artificial Sequence
  SAMD9L targeting guide sequence portion
gcaggaaagcacugagaagg

SEQ ID NO: 5413 - RNA, 20 nt, Artificial Sequence
  SAMD9L targeting guide sequence portion
gcuuuccugcaggacuaauc

SEQ ID NO: 5414 - RNA, 20 nt, Artificial Sequence
  SAMD9L targeting guide sequence portion
ggaaagcacugagaaggacc

SEQ ID NO: 5415 - RNA, 20 nt, Artificial Sequence
  SAMD9L targeting guide sequence portion
gguccuucucagugcuuucc

SEQ ID NO: 5416 - RNA, 20 nt, Artificial Sequence
  SAMD9L targeting guide sequence portion
guccugcaggaaagcacuga

SEQ ID NO: 5417 - RNA, 20 nt, Artificial Sequence
  SAMD9L targeting guide sequence portion
guccuucucagugcuuuccu

SEQ ID NO: 5418 - RNA, 20 nt, Artificial Sequence
  SAMD9L targeting guide sequence portion
gugcuuuccugcaggacuaa

SEQ ID NO: 5419 - RNA, 20 nt, Artificial Sequence
  SAMD9L targeting guide sequence portion
uacaagguccuucucagugc

SEQ ID NO: 5420 - RNA, 20 nt, Artificial Sequence
  SAMD9L targeting guide sequence portion
uaguccugcaggaaagcacu

SEQ ID NO: 5421 - RNA, 20 nt, Artificial Sequence
  SAMD9L targeting guide sequence portion
ucagugcuuuccugcaggac

SEQ ID NO: 5422 - RNA, 20 nt, Artificial Sequence
  SAMD9L targeting guide sequence portion
uccugcaggaaagcacugag

SEQ ID NO: 5423 - RNA, 20 nt, Artificial Sequence
  SAMD9L targeting guide sequence portion
uccuucucagugcuuuccug

SEQ ID NO: 5424 - RNA, 20 nt, Artificial Sequence
  SAMD9L targeting guide sequence portion
ucucagugcuuuccugcagg

SEQ ID NO: 5425 - RNA, 20 nt, Artificial Sequence
  SAMD9L targeting guide sequence portion
ugcaggaaagcacugagaag

SEQ ID NO: 5426 - RNA, 20 nt, Artificial Sequence
  SAMD9L targeting guide sequence portion
ugcuuuccugcaggacuaau

SEQ ID NO: 5427 - RNA, 20 nt, Artificial Sequence
  SAMD9L targeting guide sequence portion
uuaguccugcaggaaagcac

SEQ ID NO: 5428 - RNA, 20 nt, Artificial Sequence
  SAMD9L targeting guide sequence portion
uucucagugcuuuccugcag

SEQ ID NO: 5429 - RNA, 21 nt, Artificial Sequence
  SAMD9L targeting guide sequence portion
aaagcacugagaaggaccuug

SEQ ID NO: 5430 - RNA, 21 nt, Artificial Sequence
  SAMD9L targeting guide sequence portion
aagcacugagaaggaccuugu

SEQ ID NO: 5431 - RNA, 21 nt, Artificial Sequence
  SAMD9L targeting guide sequence portion
aagguccuucucagugcuuuc

SEQ ID NO: 5432 - RNA, 21 nt, Artificial Sequence
  SAMD9L targeting guide sequence portion
acaagguccuucucagugcuu

SEQ ID NO: 5433 - RNA, 21 nt, Artificial Sequence
  SAMD9L targeting guide sequence portion
agcacugagaaggaccuugua

SEQ ID NO: 5434 - RNA, 21 nt, Artificial Sequence
  SAMD9L targeting guide sequence portion
aggaaagcacugagaaggacc

SEQ ID NO: 5435 - RNA, 21 nt, Artificial Sequence
  SAMD9L targeting guide sequence portion
agguccuucucagugcuuucc

SEQ ID NO: 5436 - RNA, 21 nt, Artificial Sequence
  SAMD9L targeting guide sequence portion
aguccugcaggaaagcacuga

SEQ ID NO: 5437 - RNA, 21 nt, Artificial Sequence
  SAMD9L targeting guide sequence portion
agugcuuuccugcaggacuaa

SEQ ID NO: 5438 - RNA, 21 nt, Artificial Sequence
  SAMD9L targeting guide sequence portion
auuaguccugcaggaaagcac

SEQ ID NO: 5439 - RNA, 21 nt, Artificial Sequence
  SAMD9L targeting guide sequence portion
caagguccuucucagugcuuu

SEQ ID NO: 5440 - RNA, 21 nt, Artificial Sequence
  SAMD9L targeting guide sequence portion
cacugagaaggaccuuguaga

SEQ ID NO: 5441 - RNA, 21 nt, Artificial Sequence
  SAMD9L targeting guide sequence portion
caggaaagcacugagaaggac

SEQ ID NO: 5442 - RNA, 21 nt, Artificial Sequence
  SAMD9L targeting guide sequence portion
cagugcuuuccugcaggacua

SEQ ID NO: 5443 - RNA, 21 nt, Artificial Sequence
  SAMD9L targeting guide sequence portion
ccugcaggaaagcacugagaa

SEQ ID NO: 5444 - RNA, 21 nt, Artificial Sequence
  SAMD9L targeting guide sequence portion
ccuucucagugcuuuccugca

SEQ ID NO: 5445 - RNA, 21 nt, Artificial Sequence
  SAMD9L targeting guide sequence portion
cuacaagguccuucucagugc

SEQ ID NO: 5446 - RNA, 21 nt, Artificial Sequence
  SAMD9L targeting guide sequence portion
cucagugcuuuccugcaggac

SEQ ID NO: 5447 - RNA, 21 nt, Artificial Sequence
  SAMD9L targeting guide sequence portion
cugcaggaaagcacugagaag

SEQ ID NO: 5448 - RNA, 21 nt, Artificial Sequence
  SAMD9L targeting guide sequence portion
cuucucagugcuuuccugcag

SEQ ID NO: 5449 - RNA, 21 nt, Artificial Sequence
  SAMD9L targeting guide sequence portion
gaaagcacugagaaggaccuu

SEQ ID NO: 5450 - RNA, 21 nt, Artificial Sequence
  SAMD9L targeting guide sequence portion
gauuaguccugcaggaaagca

SEQ ID NO: 5451 - RNA, 21 nt, Artificial Sequence
  SAMD9L targeting guide sequence portion
gcacugagaaggaccuuguag

SEQ ID NO: 5452 - RNA, 21 nt, Artificial Sequence
  SAMD9L targeting guide sequence portion
gcaggaaagcacugagaagga

SEQ ID NO: 5453 - RNA, 21 nt, Artificial Sequence
  SAMD9L targeting guide sequence portion
gcuuuccugcaggacuaaucc

SEQ ID NO: 5454 - RNA, 21 nt, Artificial Sequence
  SAMD9L targeting guide sequence portion
ggaaagcacugagaaggaccu

SEQ ID NO: 5455 - RNA, 21 nt, Artificial Sequence
  SAMD9L targeting guide sequence portion
ggauuaguccugcaggaaagc

SEQ ID NO: 5456 - RNA, 21 nt, Artificial Sequence
  SAMD9L targeting guide sequence portion
gguccuucucagugcuuuccu

SEQ ID NO: 5457 - RNA, 21 nt, Artificial Sequence
  SAMD9L targeting guide sequence portion
guccugcaggaaagcacugag

SEQ ID NO: 5458 - RNA, 21 nt, Artificial Sequence
  SAMD9L targeting guide sequence portion
guccuucucagugcuuuccug

SEQ ID NO: 5459 - RNA, 21 nt, Artificial Sequence
  SAMD9L targeting guide sequence portion
gugcuuuccugcaggacuaau

SEQ ID NO: 5460 - RNA, 21 nt, Artificial Sequence
  SAMD9L targeting guide sequence portion
uacaagguccuucucagugcu

SEQ ID NO: 5461 - RNA, 21 nt, Artificial Sequence
  SAMD9L targeting guide sequence portion
uaguccugcaggaaagcacug

SEQ ID NO: 5462 - RNA, 21 nt, Artificial Sequence
  SAMD9L targeting guide sequence portion
ucagugcuuuccugcaggacu

SEQ ID NO: 5463 - RNA, 21 nt, Artificial Sequence
  SAMD9L targeting guide sequence portion
uccugcaggaaagcacugaga

SEQ ID NO: 5464 - RNA, 21 nt, Artificial Sequence
  SAMD9L targeting guide sequence portion
uccuucucagugcuuuccugc

SEQ ID NO: 5465 - RNA, 21 nt, Artificial Sequence
  SAMD9L targeting guide sequence portion
ucuacaagguccuucucagug

SEQ ID NO: 5466 - RNA, 21 nt, Artificial Sequence
  SAMD9L targeting guide sequence portion
ucucagugcuuuccugcagga

SEQ ID NO: 5467 - RNA, 21 nt, Artificial Sequence
  SAMD9L targeting guide sequence portion
ugcaggaaagcacugagaagg

SEQ ID NO: 5468 - RNA, 21 nt, Artificial Sequence
  SAMD9L targeting guide sequence portion
ugcuuuccugcaggacuaauc

SEQ ID NO: 5469 - RNA, 21 nt, Artificial Sequence
  SAMD9L targeting guide sequence portion
uuaguccugcaggaaagcacu

SEQ ID NO: 5470 - RNA, 21 nt, Artificial Sequence
  SAMD9L targeting guide sequence portion
uucucagugcuuuccugcagg

SEQ ID NO: 5471 - RNA, 22 nt, Artificial Sequence
  SAMD9L targeting guide sequence portion
aaagcacugagaaggaccuugu

SEQ ID NO: 5472 - RNA, 22 nt, Artificial Sequence
  SAMD9L targeting guide sequence portion
aagcacugagaaggaccuugua

SEQ ID NO: 5473 - RNA, 22 nt, Artificial Sequence
  SAMD9L targeting guide sequence portion
aagguccuucucagugcuuucc

SEQ ID NO: 5474 - RNA, 22 nt, Artificial Sequence
  SAMD9L targeting guide sequence portion
acaagguccuucucagugcuuu

SEQ ID NO: 5475 - RNA, 22 nt, Artificial Sequence
  SAMD9L targeting guide sequence portion
agcacugagaaggaccuuguag

SEQ ID NO: 5476 - RNA, 22 nt, Artificial Sequence
  SAMD9L targeting guide sequence portion
aggaaagcacugagaaggaccu

SEQ ID NO: 5477 - RNA, 22 nt, Artificial Sequence
  SAMD9L targeting guide sequence portion
aggauuaguccugcaggaaagc

SEQ ID NO: 5478 - RNA, 22 nt, Artificial Sequence
  SAMD9L targeting guide sequence portion
agguccuucucagugcuuuccu

SEQ ID NO: 5479 - RNA, 22 nt, Artificial Sequence
  SAMD9L targeting guide sequence portion
aguccugcaggaaagcacugag

SEQ ID NO: 5480 - RNA, 22 nt, Artificial Sequence
  SAMD9L targeting guide sequence portion
agugcuuuccugcaggacuaau

SEQ ID NO: 5481 - RNA, 22 nt, Artificial Sequence
  SAMD9L targeting guide sequence portion
auuaguccugcaggaaagcacu

SEQ ID NO: 5482 - RNA, 22 nt, Artificial Sequence
  SAMD9L targeting guide sequence portion
caagguccuucucagugcuuuc

SEQ ID NO: 5483 - RNA, 22 nt, Artificial Sequence
  SAMD9L targeting guide sequence portion
cacugagaaggaccuuguagaa

SEQ ID NO: 5484 - RNA, 22 nt, Artificial Sequence
  SAMD9L targeting guide sequence portion
caggaaagcacugagaaggacc

SEQ ID NO: 5485 - RNA, 22 nt, Artificial Sequence
  SAMD9L targeting guide sequence portion
cagugcuuuccugcaggacuaa

SEQ ID NO: 5486 - RNA, 22 nt, Artificial Sequence
  SAMD9L targeting guide sequence portion
ccugcaggaaagcacugagaag

SEQ ID NO: 5487 - RNA, 22 nt, Artificial Sequence
  SAMD9L targeting guide sequence portion
ccuucucagugcuuuccugcag

SEQ ID NO: 5488 - RNA, 22 nt, Artificial Sequence
  SAMD9L targeting guide sequence portion
cuacaagguccuucucagugcu

SEQ ID NO: 5489 - RNA, 22 nt, Artificial Sequence
  SAMD9L targeting guide sequence portion
cucagugcuuuccugcaggacu

SEQ ID NO: 5490 - RNA, 22 nt, Artificial Sequence
  SAMD9L targeting guide sequence portion
cugcaggaaagcacugagaagg

SEQ ID NO: 5491 - RNA, 22 nt, Artificial Sequence
  SAMD9L targeting guide sequence portion
cuucucagugcuuuccugcagg

SEQ ID NO: 5492 - RNA, 22 nt, Artificial Sequence
  SAMD9L targeting guide sequence portion
gaaagcacugagaaggaccuug

SEQ ID NO: 5493 - RNA, 22 nt, Artificial Sequence
  SAMD9L targeting guide sequence portion
gauuaguccugcaggaaagcac

SEQ ID NO: 5494 - RNA, 22 nt, Artificial Sequence
  SAMD9L targeting guide sequence portion
gcacugagaaggaccuuguaga

SEQ ID NO: 5495 - RNA, 22 nt, Artificial Sequence
  SAMD9L targeting guide sequence portion
gcaggaaagcacugagaaggac

SEQ ID NO: 5496 - RNA, 22 nt, Artificial Sequence
  SAMD9L targeting guide sequence portion
gcuuuccugcaggacuaauccu

SEQ ID NO: 5497 - RNA, 22 nt, Artificial Sequence
  SAMD9L targeting guide sequence portion
ggaaagcacugagaaggaccuu

SEQ ID NO: 5498 - RNA, 22 nt, Artificial Sequence
  SAMD9L targeting guide sequence portion
ggauuaguccugcaggaaagca

SEQ ID NO: 5499 - RNA, 22 nt, Artificial Sequence
  SAMD9L targeting guide sequence portion
gguccuucucagugcuuuccug

SEQ ID NO: 5500 - RNA, 22 nt, Artificial Sequence
  SAMD9L targeting guide sequence portion
guccugcaggaaagcacugaga

SEQ ID NO: 5501 - RNA, 22 nt, Artificial Sequence
  SAMD9L targeting guide sequence portion
guccuucucagugcuuuccugc

SEQ ID NO: 5502 - RNA, 22 nt, Artificial Sequence
  SAMD9L targeting guide sequence portion
gugcuuuccugcaggacuaauc

SEQ ID NO: 5503 - RNA, 22 nt, Artificial Sequence
  SAMD9L targeting guide sequence portion
uacaagguccuucucagugcuu

SEQ ID NO: 5504 - RNA, 22 nt, Artificial Sequence
  SAMD9L targeting guide sequence portion
uaguccugcaggaaagcacuga

SEQ ID NO: 5505 - RNA, 22 nt, Artificial Sequence
  SAMD9L targeting guide sequence portion
ucagugcuuuccugcaggacua

SEQ ID NO: 5506 - RNA, 22 nt, Artificial Sequence
  SAMD9L targeting guide sequence portion
uccugcaggaaagcacugagaa

SEQ ID NO: 5507 - RNA, 22 nt, Artificial Sequence
  SAMD9L targeting guide sequence portion
uccuucucagugcuuuccugca

SEQ ID NO: 5508 - RNA, 22 nt, Artificial Sequence
  SAMD9L targeting guide sequence portion
ucuacaagguccuucucagugc

SEQ ID NO: 5509 - RNA, 22 nt, Artificial Sequence
  SAMD9L targeting guide sequence portion
ucucagugcuuuccugcaggac

SEQ ID NO: 5510 - RNA, 22 nt, Artificial Sequence
  SAMD9L targeting guide sequence portion
ugcaggaaagcacugagaagga

SEQ ID NO: 5511 - RNA, 22 nt, Artificial Sequence
  SAMD9L targeting guide sequence portion
ugcuuuccugcaggacuaaucc

SEQ ID NO: 5512 - RNA, 22 nt, Artificial Sequence
  SAMD9L targeting guide sequence portion
uuaguccugcaggaaagcacug

SEQ ID NO: 5513 - RNA, 22 nt, Artificial Sequence
  SAMD9L targeting guide sequence portion
uucuacaagguccuucucagug

SEQ ID NO: 5514 - RNA, 22 nt, Artificial Sequence
  SAMD9L targeting guide sequence portion
uucucagugcuuuccugcagga

SEQ ID NO: 5515 - RNA, 20 nt, Artificial Sequence
  SAMD9L targeting guide sequence portion
aagguccuucucaguugauu

SEQ ID NO: 5516 - RNA, 20 nt, Artificial Sequence
  SAMD9L targeting guide sequence portion
aaucaacugagaaggaccuu

SEQ ID NO: 5517 - RNA, 20 nt, Artificial Sequence
  SAMD9L targeting guide sequence portion
acaagguccuucucaguuga

SEQ ID NO: 5518 - RNA, 20 nt, Artificial Sequence
  SAMD9L targeting guide sequence portion
aggaaucaacugagaaggac

SEQ ID NO: 5519 - RNA, 20 nt, Artificial Sequence
  SAMD9L targeting guide sequence portion
aggauuaguccugcaggaau

SEQ ID NO: 5520 - RNA, 20 nt, Artificial Sequence
  SAMD9L targeting guide sequence portion
agguccuucucaguugauuc

SEQ ID NO: 5521 - RNA, 20 nt, Artificial Sequence
  SAMD9L targeting guide sequence portion
aguccugcaggaaucaacug

SEQ ID NO: 5522 - RNA, 20 nt, Artificial Sequence
  SAMD9L targeting guide sequence portion
aguugauuccugcaggacua

SEQ ID NO: 5523 - RNA, 20 nt, Artificial Sequence
  SAMD9L targeting guide sequence portion
aucaacugagaaggaccuug

SEQ ID NO: 5524 - RNA, 20 nt, Artificial Sequence
  SAMD9L targeting guide sequence portion
auuaguccugcaggaaucaa

SEQ ID NO: 5525 - RNA, 20 nt, Artificial Sequence
  SAMD9L targeting guide sequence portion
caacugagaaggaccuugua

SEQ ID NO: 5526 - RNA, 20 nt, Artificial Sequence
  SAMD9L targeting guide sequence portion
caagguccuucucaguugau

SEQ ID NO: 5527 - RNA, 20 nt, Artificial Sequence
  SAMD9L targeting guide sequence portion
caggaaucaacugagaagga

SEQ ID NO: 5528 - RNA, 20 nt, Artificial Sequence
  SAMD9L targeting guide sequence portion
caguugauuccugcaggacu

SEQ ID NO: 5529 - RNA, 20 nt, Artificial Sequence
  SAMD9L targeting guide sequence portion
ccugcaggaaucaacugaga

SEQ ID NO: 5530 - RNA, 20 nt, Artificial Sequence
  SAMD9L targeting guide sequence portion
ccuucucaguugauuccugc

SEQ ID NO: 5531 - RNA, 20 nt, Artificial Sequence
  SAMD9L targeting guide sequence portion
cuacaagguccuucucaguu

SEQ ID NO: 5532 - RNA, 20 nt, Artificial Sequence
  SAMD9L targeting guide sequence portion
cucaguugauuccugcagga

SEQ ID NO: 5533 - RNA, 20 nt, Artificial Sequence
  SAMD9L targeting guide sequence portion
cugcaggaaucaacugagaa

SEQ ID NO: 5534 - RNA, 20 nt, Artificial Sequence
  SAMD9L targeting guide sequence portion
cuucucaguugauuccugca

SEQ ID NO: 5535 - RNA, 20 nt, Artificial Sequence
  SAMD9L targeting guide sequence portion
gaaucaacugagaaggaccu

SEQ ID NO: 5536 - RNA, 20 nt, Artificial Sequence
  SAMD9L targeting guide sequence portion
gauuaguccugcaggaauca

SEQ ID NO: 5537 - RNA, 20 nt, Artificial Sequence
  SAMD9L targeting guide sequence portion
gauuccugcaggacuaaucc

SEQ ID NO: 5538 - RNA, 20 nt, Artificial Sequence
  SAMD9L targeting guide sequence portion
gcaggaaucaacugagaagg

SEQ ID NO: 5539 - RNA, 20 nt, Artificial Sequence
  SAMD9L targeting guide sequence portion
ggaaucaacugagaaggacc

SEQ ID NO: 5540 - RNA, 20 nt, Artificial Sequence
  SAMD9L targeting guide sequence portion
ggauuaguccugcaggaauc

SEQ ID NO: 5541 - RNA, 20 nt, Artificial Sequence
  SAMD9L targeting guide sequence portion
gguccuucucaguugauucc

SEQ ID NO: 5542 - RNA, 20 nt, Artificial Sequence
  SAMD9L targeting guide sequence portion
guaacaggauuaguccugca

SEQ ID NO: 5543 - RNA, 20 nt, Artificial Sequence
  SAMD9L targeting guide sequence portion
guccugcaggaaucaacuga

SEQ ID NO: 5544 - RNA, 20 nt, Artificial Sequence
  SAMD9L targeting guide sequence portion
guccuucucaguugauuccu

SEQ ID NO: 5545 - RNA, 20 nt, Artificial Sequence
  SAMD9L targeting guide sequence portion
guugauuccugcaggacuaa

SEQ ID NO: 5546 - RNA, 20 nt, Artificial Sequence
  SAMD9L targeting guide sequence portion
uacaagguccuucucaguug

SEQ ID NO: 5547 - RNA, 20 nt, Artificial Sequence
  SAMD9L targeting guide sequence portion
uaguccugcaggaaucaacu

SEQ ID NO: 5548 - RNA, 20 nt, Artificial Sequence
  SAMD9L targeting guide sequence portion
ucaacugagaaggaccuugu

SEQ ID NO: 5549 - RNA, 20 nt, Artificial Sequence
  SAMD9L targeting guide sequence portion
ucaguugauuccugcaggac

SEQ ID NO: 5550 - RNA, 20 nt, Artificial Sequence
  SAMD9L targeting guide sequence portion
uccugcaggaaucaacugag

SEQ ID NO: 5551 - RNA, 20 nt, Artificial Sequence
  SAMD9L targeting guide sequence portion
uccuucucaguugauuccug

SEQ ID NO: 5552 - RNA, 20 nt, Artificial Sequence
  SAMD9L targeting guide sequence portion
ucucaguugauuccugcagg

SEQ ID NO: 5553 - RNA, 20 nt, Artificial Sequence
  SAMD9L targeting guide sequence portion
ugauuccugcaggacuaauc

SEQ ID NO: 5554 - RNA, 20 nt, Artificial Sequence
  SAMD9L targeting guide sequence portion
ugcaggaaucaacugagaag

SEQ ID NO: 5555 - RNA, 20 nt, Artificial Sequence
  SAMD9L targeting guide sequence portion
uuaguccugcaggaaucaac

SEQ ID NO: 5556 - RNA, 20 nt, Artificial Sequence
  SAMD9L targeting guide sequence portion
uucucaguugauuccugcag

SEQ ID NO: 5557 - RNA, 20 nt, Artificial Sequence
  SAMD9L targeting guide sequence portion
uugauuccugcaggacuaau

SEQ ID NO: 5558 - RNA, 21 nt, Artificial Sequence
  SAMD9L targeting guide sequence portion
aagguccuucucaguugauuc

SEQ ID NO: 5559 - RNA, 21 nt, Artificial Sequence
  SAMD9L targeting guide sequence portion
aaucaacugagaaggaccuug

SEQ ID NO: 5560 - RNA, 21 nt, Artificial Sequence
  SAMD9L targeting guide sequence portion
acaagguccuucucaguugau

SEQ ID NO: 5561 - RNA, 21 nt, Artificial Sequence
  SAMD9L targeting guide sequence portion
aggaaucaacugagaaggacc

SEQ ID NO: 5562 - RNA, 21 nt, Artificial Sequence
  SAMD9L targeting guide sequence portion
aggauuaguccugcaggaauc

SEQ ID NO: 5563 - RNA, 21 nt, Artificial Sequence
  SAMD9L targeting guide sequence portion
agguccuucucaguugauucc

SEQ ID NO: 5564 - RNA, 21 nt, Artificial Sequence
  SAMD9L targeting guide sequence portion
aguaacaggauuaguccugca

SEQ ID NO: 5565 - RNA, 21 nt, Artificial Sequence
  SAMD9L targeting guide sequence portion
aguccugcaggaaucaacuga

SEQ ID NO: 5566 - RNA, 21 nt, Artificial Sequence
  SAMD9L targeting guide sequence portion
aguugauuccugcaggacuaa

SEQ ID NO: 5567 - RNA, 21 nt, Artificial Sequence
  SAMD9L targeting guide sequence portion
aucaacugagaaggaccuugu

SEQ ID NO: 5568 - RNA, 21 nt, Artificial Sequence
  SAMD9L targeting guide sequence portion
auuaguccugcaggaaucaac

SEQ ID NO: 5569 - RNA, 21 nt, Artificial Sequence
  SAMD9L targeting guide sequence portion
caacugagaaggaccuuguag

SEQ ID NO: 5570 - RNA, 21 nt, Artificial Sequence
  SAMD9L targeting guide sequence portion
caagguccuucucaguugauu

SEQ ID NO: 5571 - RNA, 21 nt, Artificial Sequence
  SAMD9L targeting guide sequence portion
caggaaucaacugagaaggac

SEQ ID NO: 5572 - RNA, 21 nt, Artificial Sequence
  SAMD9L targeting guide sequence portion
caggauuaguccugcaggaau

SEQ ID NO: 5573 - RNA, 21 nt, Artificial Sequence
  SAMD9L targeting guide sequence portion
caguugauuccugcaggacua

SEQ ID NO: 5574 - RNA, 21 nt, Artificial Sequence
  SAMD9L targeting guide sequence portion
ccugcaggaaucaacugagaa

SEQ ID NO: 5575 - RNA, 21 nt, Artificial Sequence
  SAMD9L targeting guide sequence portion
ccuucucaguugauuccugca

SEQ ID NO: 5576 - RNA, 21 nt, Artificial Sequence
  SAMD9L targeting guide sequence portion
cuacaagguccuucucaguug

SEQ ID NO: 5577 - RNA, 21 nt, Artificial Sequence
  SAMD9L targeting guide sequence portion
cucaguugauuccugcaggac

SEQ ID NO: 5578 - RNA, 21 nt, Artificial Sequence
  SAMD9L targeting guide sequence portion
cugcaggaaucaacugagaag

SEQ ID NO: 5579 - RNA, 21 nt, Artificial Sequence
  SAMD9L targeting guide sequence portion
cuucucaguugauuccugcag

SEQ ID NO: 5580 - RNA, 21 nt, Artificial Sequence
  SAMD9L targeting guide sequence portion
gaaucaacugagaaggaccuu

SEQ ID NO: 5581 - RNA, 21 nt, Artificial Sequence
  SAMD9L targeting guide sequence portion
gauuaguccugcaggaaucaa

SEQ ID NO: 5582 - RNA, 21 nt, Artificial Sequence
  SAMD9L targeting guide sequence portion
gauuccugcaggacuaauccu

SEQ ID NO: 5583 - RNA, 21 nt, Artificial Sequence
  SAMD9L targeting guide sequence portion
gcaggaaucaacugagaagga

SEQ ID NO: 5584 - RNA, 21 nt, Artificial Sequence
  SAMD9L targeting guide sequence portion
ggaaucaacugagaaggaccu

SEQ ID NO: 5585 - RNA, 21 nt, Artificial Sequence
  SAMD9L targeting guide sequence portion
ggauuaguccugcaggaauca

SEQ ID NO: 5586 - RNA, 21 nt, Artificial Sequence
  SAMD9L targeting guide sequence portion
gguccuucucaguugauuccu

SEQ ID NO: 5587 - RNA, 21 nt, Artificial Sequence
  SAMD9L targeting guide sequence portion
guccugcaggaaucaacugag

SEQ ID NO: 5588 - RNA, 21 nt, Artificial Sequence
  SAMD9L targeting guide sequence portion
guccuucucaguugauuccug

SEQ ID NO: 5589 - RNA, 21 nt, Artificial Sequence
  SAMD9L targeting guide sequence portion
guugauuccugcaggacuaau

SEQ ID NO: 5590 - RNA, 21 nt, Artificial Sequence
  SAMD9L targeting guide sequence portion
uacaagguccuucucaguuga

SEQ ID NO: 5591 - RNA, 21 nt, Artificial Sequence
  SAMD9L targeting guide sequence portion
uaguccugcaggaaucaacug

SEQ ID NO: 5592 - RNA, 21 nt, Artificial Sequence
  SAMD9L targeting guide sequence portion
ucaacugagaaggaccuugua

SEQ ID NO: 5593 - RNA, 21 nt, Artificial Sequence
  SAMD9L targeting guide sequence portion
ucaguugauuccugcaggacu

SEQ ID NO: 5594 - RNA, 21 nt, Artificial Sequence
  SAMD9L targeting guide sequence portion
uccugcaggaaucaacugaga

SEQ ID NO: 5595 - RNA, 21 nt, Artificial Sequence
  SAMD9L targeting guide sequence portion
uccuucucaguugauuccugc

SEQ ID NO: 5596 - RNA, 21 nt, Artificial Sequence
  SAMD9L targeting guide sequence portion
ucuacaagguccuucucaguu

SEQ ID NO: 5597 - RNA, 21 nt, Artificial Sequence
  SAMD9L targeting guide sequence portion
ucucaguugauuccugcagga

SEQ ID NO: 5598 - RNA, 21 nt, Artificial Sequence
  SAMD9L targeting guide sequence portion
ugauuccugcaggacuaaucc

SEQ ID NO: 5599 - RNA, 21 nt, Artificial Sequence
  SAMD9L targeting guide sequence portion
ugcaggaaucaacugagaagg

SEQ ID NO: 5600 - RNA, 21 nt, Artificial Sequence
  SAMD9L targeting guide sequence portion
uuaguccugcaggaaucaacu

SEQ ID NO: 5601 - RNA, 21 nt, Artificial Sequence
  SAMD9L targeting guide sequence portion
uucucaguugauuccugcagg

SEQ ID NO: 5602 - RNA, 21 nt, Artificial Sequence
  SAMD9L targeting guide sequence portion
uugauuccugcaggacuaauc

SEQ ID NO: 5603 - RNA, 22 nt, Artificial Sequence
  SAMD9L targeting guide sequence portion
aagguccuucucaguugauucc

SEQ ID NO: 5604 - RNA, 22 nt, Artificial Sequence
  SAMD9L targeting guide sequence portion
aaguaacaggauuaguccugca

SEQ ID NO: 5605 - RNA, 22 nt, Artificial Sequence
  SAMD9L targeting guide sequence portion
aaucaacugagaaggaccuugu

SEQ ID NO: 5606 - RNA, 22 nt, Artificial Sequence
  SAMD9L targeting guide sequence portion
acaagguccuucucaguugauu

SEQ ID NO: 5607 - RNA, 22 nt, Artificial Sequence
  SAMD9L targeting guide sequence portion
acaggauuaguccugcaggaau

SEQ ID NO: 5608 - RNA, 22 nt, Artificial Sequence
  SAMD9L targeting guide sequence portion
aggaaucaacugagaaggaccu

SEQ ID NO: 5609 - RNA, 22 nt, Artificial Sequence
  SAMD9L targeting guide sequence portion
aggauuaguccugcaggaauca

SEQ ID NO: 5610 - RNA, 22 nt, Artificial Sequence
  SAMD9L targeting guide sequence portion
agguccuucucaguugauuccu

SEQ ID NO: 5611 - RNA, 22 nt, Artificial Sequence
  SAMD9L targeting guide sequence portion
aguccugcaggaaucaacugag

SEQ ID NO: 5612 - RNA, 22 nt, Artificial Sequence
  SAMD9L targeting guide sequence portion
aguugauuccugcaggacuaau

SEQ ID NO: 5613 - RNA, 22 nt, Artificial Sequence
  SAMD9L targeting guide sequence portion
aucaacugagaaggaccuugua

SEQ ID NO: 5614 - RNA, 22 nt, Artificial Sequence
  SAMD9L targeting guide sequence portion
auuaguccugcaggaaucaacu

SEQ ID NO: 5615 - RNA, 22 nt, Artificial Sequence
  SAMD9L targeting guide sequence portion
caacugagaaggaccuuguaga

SEQ ID NO: 5616 - RNA, 22 nt, Artificial Sequence
  SAMD9L targeting guide sequence portion
caagguccuucucaguugauuc

SEQ ID NO: 5617 - RNA, 22 nt, Artificial Sequence
  SAMD9L targeting guide sequence portion
caggaaucaacugagaaggacc

SEQ ID NO: 5618 - RNA, 22 nt, Artificial Sequence
  SAMD9L targeting guide sequence portion
caggauuaguccugcaggaauc

SEQ ID NO: 5619 - RNA, 22 nt, Artificial Sequence
  SAMD9L targeting guide sequence portion
caguugauuccugcaggacuaa

SEQ ID NO: 5620 - RNA, 22 nt, Artificial Sequence
  SAMD9L targeting guide sequence portion
ccugcaggaaucaacugagaag

SEQ ID NO: 5621 - RNA, 22 nt, Artificial Sequence
  SAMD9L targeting guide sequence portion
ccuucucaguugauuccugcag

SEQ ID NO: 5622 - RNA, 22 nt, Artificial Sequence
  SAMD9L targeting guide sequence portion
cuacaagguccuucucaguuga

SEQ ID NO: 5623 - RNA, 22 nt, Artificial Sequence
  SAMD9L targeting guide sequence portion
cucaguugauuccugcaggacu

SEQ ID NO: 5624 - RNA, 22 nt, Artificial Sequence
  SAMD9L targeting guide sequence portion
cugcaggaaucaacugagaagg

SEQ ID NO: 5625 - RNA, 22 nt, Artificial Sequence
  SAMD9L targeting guide sequence portion
cuucucaguugauuccugcagg

SEQ ID NO: 5626 - RNA, 22 nt, Artificial Sequence
  SAMD9L targeting guide sequence portion
gaaucaacugagaaggaccuug

SEQ ID NO: 5627 - RNA, 22 nt, Artificial Sequence
  SAMD9L targeting guide sequence portion
gauuaguccugcaggaaucaac

SEQ ID NO: 5628 - RNA, 22 nt, Artificial Sequence
  SAMD9L targeting guide sequence portion
gauuccugcaggacuaauccug

SEQ ID NO: 5629 - RNA, 22 nt, Artificial Sequence
  SAMD9L targeting guide sequence portion
gcaggaaucaacugagaaggac

SEQ ID NO: 5630 - RNA, 22 nt, Artificial Sequence
  SAMD9L targeting guide sequence portion
ggaaucaacugagaaggaccuu

SEQ ID NO: 5631 - RNA, 22 nt, Artificial Sequence
  SAMD9L targeting guide sequence portion
ggauuaguccugcaggaaucaa

SEQ ID NO: 5632 - RNA, 22 nt, Artificial Sequence
  SAMD9L targeting guide sequence portion
gguccuucucaguugauuccug

SEQ ID NO: 5633 - RNA, 22 nt, Artificial Sequence
  SAMD9L targeting guide sequence portion
guccugcaggaaucaacugaga

SEQ ID NO: 5634 - RNA, 22 nt, Artificial Sequence
  SAMD9L targeting guide sequence portion
guccuucucaguugauuccugc

SEQ ID NO: 5635 - RNA, 22 nt, Artificial Sequence
  SAMD9L targeting guide sequence portion
guugauuccugcaggacuaauc

SEQ ID NO: 5636 - RNA, 22 nt, Artificial Sequence
  SAMD9L targeting guide sequence portion
uacaagguccuucucaguugau

SEQ ID NO: 5637 - RNA, 22 nt, Artificial Sequence
  SAMD9L targeting guide sequence portion
uaguccugcaggaaucaacuga

SEQ ID NO: 5638 - RNA, 22 nt, Artificial Sequence
  SAMD9L targeting guide sequence portion
ucaacugagaaggaccuuguag

SEQ ID NO: 5639 - RNA, 22 nt, Artificial Sequence
  SAMD9L targeting guide sequence portion
ucaguugauuccugcaggacua

SEQ ID NO: 5640 - RNA, 22 nt, Artificial Sequence
  SAMD9L targeting guide sequence portion
uccugcaggaaucaacugagaa

SEQ ID NO: 5641 - RNA, 22 nt, Artificial Sequence
  SAMD9L targeting guide sequence portion
uccuucucaguugauuccugca

SEQ ID NO: 5642 - RNA, 22 nt, Artificial Sequence
  SAMD9L targeting guide sequence portion
ucuacaagguccuucucaguug

SEQ ID NO: 5643 - RNA, 22 nt, Artificial Sequence
  SAMD9L targeting guide sequence portion
ucucaguugauuccugcaggac

SEQ ID NO: 5644 - RNA, 22 nt, Artificial Sequence
  SAMD9L targeting guide sequence portion
ugauuccugcaggacuaauccu

SEQ ID NO: 5645 - RNA, 22 nt, Artificial Sequence
  SAMD9L targeting guide sequence portion
ugcaggaaucaacugagaagga

SEQ ID NO: 5646 - RNA, 22 nt, Artificial Sequence
  SAMD9L targeting guide sequence portion
uuaguccugcaggaaucaacug

SEQ ID NO: 5647 - RNA, 22 nt, Artificial Sequence
  SAMD9L targeting guide sequence portion
uucuacaagguccuucucaguu

SEQ ID NO: 5648 - RNA, 22 nt, Artificial Sequence
  SAMD9L targeting guide sequence portion
uucucaguugauuccugcagga

SEQ ID NO: 5649 - RNA, 22 nt, Artificial Sequence
  SAMD9L targeting guide sequence portion
uugauuccugcaggacuaaucc

SEQ ID NO: 5650 - RNA, 20 nt, Artificial Sequence
  SAMD9L targeting guide sequence portion
aaaaaaccuaauguagauga

SEQ ID NO: 5651 - RNA, 20 nt, Artificial Sequence
  SAMD9L targeting guide sequence portion
aacccaucaucuacauuagg

SEQ ID NO: 5652 - RNA, 20 nt, Artificial Sequence
  SAMD9L targeting guide sequence portion
acccaucaucuacauuaggu

SEQ ID NO: 5653 - RNA, 20 nt, Artificial Sequence
  SAMD9L targeting guide sequence portion
agggauagcauuaggaaaaa

SEQ ID NO: 5654 - RNA, 20 nt, Artificial Sequence
  SAMD9L targeting guide sequence portion
aucaucuacauuagguuuuu

SEQ ID NO: 5655 - RNA, 20 nt, Artificial Sequence
  SAMD9L targeting guide sequence portion
caucaucuacauuagguuuu

SEQ ID NO: 5656 - RNA, 20 nt, Artificial Sequence
  SAMD9L targeting guide sequence portion
ccaucaucuacauuagguuu

SEQ ID NO: 5657 - RNA, 20 nt, Artificial Sequence
  SAMD9L targeting guide sequence portion
cccaucaucuacauuagguu

SEQ ID NO: 5658 - RNA, 20 nt, Artificial Sequence
  SAMD9L targeting guide sequence portion
gagggauagcauuaggaaaa

SEQ ID NO: 5659 - RNA, 20 nt, Artificial Sequence
  SAMD9L targeting guide sequence portion
ggagggauagcauuaggaaa

SEQ ID NO: 5660 - RNA, 20 nt, Artificial Sequence
  SAMD9L targeting guide sequence portion
gggagggauagcauuaggaa

SEQ ID NO: 5661 - RNA, 20 nt, Artificial Sequence
  SAMD9L targeting guide sequence portion
gggauagcauuaggaaaaaa

SEQ ID NO: 5662 - RNA, 20 nt, Artificial Sequence
  SAMD9L targeting guide sequence portion
ggggagggauagcauuagga

SEQ ID NO: 5663 - RNA, 20 nt, Artificial Sequence
  SAMD9L targeting guide sequence portion
ucaucuacauuagguuuuuu

SEQ ID NO: 5664 - RNA, 21 nt, Artificial Sequence
  SAMD9L targeting guide sequence portion
aaaaaaccuaauguagaugau

SEQ ID NO: 5665 - RNA, 21 nt, Artificial Sequence
  SAMD9L targeting guide sequence portion
aacccaucaucuacauuaggu

SEQ ID NO: 5666 - RNA, 21 nt, Artificial Sequence
  SAMD9L targeting guide sequence portion
acccaucaucuacauuagguu

SEQ ID NO: 5667 - RNA, 21 nt, Artificial Sequence
  SAMD9L targeting guide sequence portion
agggauagcauuaggaaaaaa

SEQ ID NO: 5668 - RNA, 21 nt, Artificial Sequence
  SAMD9L targeting guide sequence portion
aggggagggauagcauuagga

SEQ ID NO: 5669 - RNA, 21 nt, Artificial Sequence
  SAMD9L targeting guide sequence portion
aucaucuacauuagguuuuuu

SEQ ID NO: 5670 - RNA, 21 nt, Artificial Sequence
  SAMD9L targeting guide sequence portion
caacccaucaucuacauuagg

SEQ ID NO: 5671 - RNA, 21 nt, Artificial Sequence
  SAMD9L targeting guide sequence portion
caucaucuacauuagguuuuu

SEQ ID NO: 5672 - RNA, 21 nt, Artificial Sequence
  SAMD9L targeting guide sequence portion
ccaucaucuacauuagguuuu

SEQ ID NO: 5673 - RNA, 21 nt, Artificial Sequence
  SAMD9L targeting guide sequence portion
cccaucaucuacauuagguuu

SEQ ID NO: 5674 - RNA, 21 nt, Artificial Sequence
  SAMD9L targeting guide sequence portion
gagggauagcauuaggaaaaa

SEQ ID NO: 5675 - RNA, 21 nt, Artificial Sequence
  SAMD9L targeting guide sequence portion
ggagggauagcauuaggaaaa

SEQ ID NO: 5676 - RNA, 21 nt, Artificial Sequence
  SAMD9L targeting guide sequence portion
gggagggauagcauuaggaaa

SEQ ID NO: 5677 - RNA, 21 nt, Artificial Sequence
  SAMD9L targeting guide sequence portion
ggggagggauagcauuaggaa

SEQ ID NO: 5678 - RNA, 22 nt, Artificial Sequence
  SAMD9L targeting guide sequence portion
aaaaaaccuaauguagaugaug

SEQ ID NO: 5679 - RNA, 22 nt, Artificial Sequence
  SAMD9L targeting guide sequence portion
aacccaucaucuacauuagguu

SEQ ID NO: 5680 - RNA, 22 nt, Artificial Sequence
  SAMD9L targeting guide sequence portion
acccaucaucuacauuagguuu

SEQ ID NO: 5681 - RNA, 22 nt, Artificial Sequence
  SAMD9L targeting guide sequence portion
aggggagggauagcauuaggaa

SEQ ID NO: 5682 - RNA, 22 nt, Artificial Sequence
  SAMD9L targeting guide sequence portion
caacccaucaucuacauuaggu

SEQ ID NO: 5683 - RNA, 22 nt, Artificial Sequence
  SAMD9L targeting guide sequence portion
caucaucuacauuagguuuuuu

SEQ ID NO: 5684 - RNA, 22 nt, Artificial Sequence
  SAMD9L targeting guide sequence portion
ccaucaucuacauuagguuuuu

SEQ ID NO: 5685 - RNA, 22 nt, Artificial Sequence
  SAMD9L targeting guide sequence portion
cccaucaucuacauuagguuuu

SEQ ID NO: 5686 - RNA, 22 nt, Artificial Sequence
  SAMD9L targeting guide sequence portion
gagggauagcauuaggaaaaaa

SEQ ID NO: 5687 - RNA, 22 nt, Artificial Sequence
  SAMD9L targeting guide sequence portion
ggagggauagcauuaggaaaaa

SEQ ID NO: 5688 - RNA, 22 nt, Artificial Sequence
  SAMD9L targeting guide sequence portion
gggagggauagcauuaggaaaa

SEQ ID NO: 5689 - RNA, 22 nt, Artificial Sequence
  SAMD9L targeting guide sequence portion
ggggagggauagcauuaggaaa

SEQ ID NO: 5690 - RNA, 22 nt, Artificial Sequence
  SAMD9L targeting guide sequence portion
uaggggagggauagcauuagga

SEQ ID NO: 5691 - RNA, 22 nt, Artificial Sequence
  SAMD9L targeting guide sequence portion
ucaacccaucaucuacauuagg

SEQ ID NO: 5692 - RNA, 20 nt, Artificial Sequence
  SAMD9L targeting guide sequence portion
aaaaaucuuuuauuggcucu

SEQ ID NO: 5693 - RNA, 20 nt, Artificial Sequence
  SAMD9L targeting guide sequence portion
aaaaucuuuuauuggcucuu

SEQ ID NO: 5694 - RNA, 20 nt, Artificial Sequence
  SAMD9L targeting guide sequence portion
aaacuugcccuaaagagcca

SEQ ID NO: 5695 - RNA, 20 nt, Artificial Sequence
  SAMD9L targeting guide sequence portion
aaagaaucaaacuugcccua

SEQ ID NO: 5696 - RNA, 20 nt, Artificial Sequence
  SAMD9L targeting guide sequence portion
aaagagccaauaaaagauuu

SEQ ID NO: 5697 - RNA, 20 nt, Artificial Sequence
  SAMD9L targeting guide sequence portion
aaaucuuuuauuggcucuuu

SEQ ID NO: 5698 - RNA, 20 nt, Artificial Sequence
  SAMD9L targeting guide sequence portion
aacuugcccuaaagagccaa

SEQ ID NO: 5699 - RNA, 20 nt, Artificial Sequence
  SAMD9L targeting guide sequence portion
aagaaucaaacuugcccuaa

SEQ ID NO: 5700 - RNA, 20 nt, Artificial Sequence
  SAMD9L targeting guide sequence portion
aagagccaauaaaagauuuu

SEQ ID NO: 5701 - RNA, 20 nt, Artificial Sequence
  SAMD9L targeting guide sequence portion
aaucaaacuugcccuaaaga

SEQ ID NO: 5702 - RNA, 20 nt, Artificial Sequence
  SAMD9L targeting guide sequence portion
aaucuuuuauuggcucuuua

SEQ ID NO: 5703 - RNA, 20 nt, Artificial Sequence
  SAMD9L targeting guide sequence portion
acuugcccuaaagagccaau

SEQ ID NO: 5704 - RNA, 20 nt, Artificial Sequence
  SAMD9L targeting guide sequence portion
agaaucaaacuugcccuaaa

SEQ ID NO: 5705 - RNA, 20 nt, Artificial Sequence
  SAMD9L targeting guide sequence portion
aucaaacuugcccuaaagag

SEQ ID NO: 5706 - RNA, 20 nt, Artificial Sequence
  SAMD9L targeting guide sequence portion
aucuuuuauuggcucuuuag

SEQ ID NO: 5707 - RNA, 20 nt, Artificial Sequence
  SAMD9L targeting guide sequence portion
auuggcucuuuagggcaagu

SEQ ID NO: 5708 - RNA, 20 nt, Artificial Sequence
  SAMD9L targeting guide sequence portion
caaaaaucuuuuauuggcuc

SEQ ID NO: 5709 - RNA, 20 nt, Artificial Sequence
  SAMD9L targeting guide sequence portion
caaacuugcccuaaagagcc

SEQ ID NO: 5710 - RNA, 20 nt, Artificial Sequence
  SAMD9L targeting guide sequence portion
ccaaaaaucuuuuauuggcu

SEQ ID NO: 5711 - RNA, 20 nt, Artificial Sequence
  SAMD9L targeting guide sequence portion
cccaaaaaucuuuuauuggc

SEQ ID NO: 5712 - RNA, 20 nt, Artificial Sequence
  SAMD9L targeting guide sequence portion
cccuaaagagccaauaaaag

SEQ ID NO: 5713 - RNA, 20 nt, Artificial Sequence
  SAMD9L targeting guide sequence portion
ccuaaagagccaauaaaaga

SEQ ID NO: 5714 - RNA, 20 nt, Artificial Sequence
  SAMD9L targeting guide sequence portion
ccuuuaaagaaucaaacuug

SEQ ID NO: 5715 - RNA, 20 nt, Artificial Sequence
  SAMD9L targeting guide sequence portion
cuaaagagccaauaaaagau

SEQ ID NO: 5716 - RNA, 20 nt, Artificial Sequence
  SAMD9L targeting guide sequence portion
cucuuuagggcaaguuugau

SEQ ID NO: 5717 - RNA, 20 nt, Artificial Sequence
  SAMD9L targeting guide sequence portion
cuugcccuaaagagccaaua

SEQ ID NO: 5718 - RNA, 20 nt, Artificial Sequence
  SAMD9L targeting guide sequence portion
cuuuaaagaaucaaacuugc

SEQ ID NO: 5719 - RNA, 20 nt, Artificial Sequence
  SAMD9L targeting guide sequence portion
cuuuagggcaaguuugauuc

SEQ ID NO: 5720 - RNA, 20 nt, Artificial Sequence
  SAMD9L targeting guide sequence portion
cuuuuauuggcucuuuaggg

SEQ ID NO: 5721 - RNA, 20 nt, Artificial Sequence
  SAMD9L targeting guide sequence portion
gaaucaaacuugcccuaaag

SEQ ID NO: 5722 - RNA, 20 nt, Artificial Sequence
  SAMD9L targeting guide sequence portion
gcccuaaagagccaauaaaa

SEQ ID NO: 5723 - RNA, 20 nt, Artificial Sequence
  SAMD9L targeting guide sequence portion
gcucuuuagggcaaguuuga

SEQ ID NO: 5724 - RNA, 20 nt, Artificial Sequence
  SAMD9L targeting guide sequence portion
ggcucuuuagggcaaguuug

SEQ ID NO: 5725 - RNA, 20 nt, Artificial Sequence
  SAMD9L targeting guide sequence portion
uaaagaaucaaacuugcccu

SEQ ID NO: 5726 - RNA, 20 nt, Artificial Sequence
  SAMD9L targeting guide sequence portion
uaaagagccaauaaaagauu

SEQ ID NO: 5727 - RNA, 20 nt, Artificial Sequence
  SAMD9L targeting guide sequence portion
uauuggcucuuuagggcaag

SEQ ID NO: 5728 - RNA, 20 nt, Artificial Sequence
  SAMD9L targeting guide sequence portion
ucaaacuugcccuaaagagc

SEQ ID NO: 5729 - RNA, 20 nt, Artificial Sequence
  SAMD9L targeting guide sequence portion
ucccaaaaaucuuuuauugg

SEQ ID NO: 5730 - RNA, 20 nt, Artificial Sequence
  SAMD9L targeting guide sequence portion
ucuuuagggcaaguuugauu

SEQ ID NO: 5731 - RNA, 20 nt, Artificial Sequence
  SAMD9L targeting guide sequence portion
ucuuuuauuggcucuuuagg

SEQ ID NO: 5732 - RNA, 20 nt, Artificial Sequence
  SAMD9L targeting guide sequence portion
ugcccuaaagagccaauaaa

SEQ ID NO: 5733 - RNA, 20 nt, Artificial Sequence
  SAMD9L targeting guide sequence portion
uggcucuuuagggcaaguuu

SEQ ID NO: 5734 - RNA, 20 nt, Artificial Sequence
  SAMD9L targeting guide sequence portion
uuaaagaaucaaacuugccc

SEQ ID NO: 5735 - RNA, 20 nt, Artificial Sequence
  SAMD9L targeting guide sequence portion
uuagggcaaguuugauucuu

SEQ ID NO: 5736 - RNA, 20 nt, Artificial Sequence
  SAMD9L targeting guide sequence portion
uuauuggcucuuuagggcaa

SEQ ID NO: 5737 - RNA, 20 nt, Artificial Sequence
  SAMD9L targeting guide sequence portion
uucccaaaaaucuuuuauug

SEQ ID NO: 5738 - RNA, 20 nt, Artificial Sequence
  SAMD9L targeting guide sequence portion
uugcccuaaagagccaauaa

SEQ ID NO: 5739 - RNA, 20 nt, Artificial Sequence
  SAMD9L targeting guide sequence portion
uuggcucuuuagggcaaguu

SEQ ID NO: 5740 - RNA, 20 nt, Artificial Sequence
  SAMD9L targeting guide sequence portion
uuuaaagaaucaaacuugcc

SEQ ID NO: 5741 - RNA, 20 nt, Artificial Sequence
  SAMD9L targeting guide sequence portion
uuuagggcaaguuugauucu

SEQ ID NO: 5742 - RNA, 20 nt, Artificial Sequence
  SAMD9L targeting guide sequence portion
uuuauuggcucuuuagggca

SEQ ID NO: 5743 - RNA, 20 nt, Artificial Sequence
  SAMD9L targeting guide sequence portion
uuuuauuggcucuuuagggc

SEQ ID NO: 5744 - RNA, 21 nt, Artificial Sequence
  SAMD9L targeting guide sequence portion
aaaaaucuuuuauuggcucuu

SEQ ID NO: 5745 - RNA, 21 nt, Artificial Sequence
  SAMD9L targeting guide sequence portion
aaaaucuuuuauuggcucuuu

SEQ ID NO: 5746 - RNA, 21 nt, Artificial Sequence
  SAMD9L targeting guide sequence portion
aaacuugcccuaaagagccaa

SEQ ID NO: 5747 - RNA, 21 nt, Artificial Sequence
  SAMD9L targeting guide sequence portion
aaagaaucaaacuugcccuaa

SEQ ID NO: 5748 - RNA, 21 nt, Artificial Sequence
  SAMD9L targeting guide sequence portion
aaagagccaauaaaagauuuu

SEQ ID NO: 5749 - RNA, 21 nt, Artificial Sequence
  SAMD9L targeting guide sequence portion
aaaucuuuuauuggcucuuua

SEQ ID NO: 5750 - RNA, 21 nt, Artificial Sequence
  SAMD9L targeting guide sequence portion
aacuugcccuaaagagccaau

SEQ ID NO: 5751 - RNA, 21 nt, Artificial Sequence
  SAMD9L targeting guide sequence portion
aagaaucaaacuugcccuaaa

SEQ ID NO: 5752 - RNA, 21 nt, Artificial Sequence
  SAMD9L targeting guide sequence portion
aagagccaauaaaagauuuuu

SEQ ID NO: 5753 - RNA, 21 nt, Artificial Sequence
  SAMD9L targeting guide sequence portion
aaucaaacuugcccuaaagag

SEQ ID NO: 5754 - RNA, 21 nt, Artificial Sequence
  SAMD9L targeting guide sequence portion
aaucuuuuauuggcucuuuag

SEQ ID NO: 5755 - RNA, 21 nt, Artificial Sequence
  SAMD9L targeting guide sequence portion
acuugcccuaaagagccaaua

SEQ ID NO: 5756 - RNA, 21 nt, Artificial Sequence
  SAMD9L targeting guide sequence portion
agaaucaaacuugcccuaaag

SEQ ID NO: 5757 - RNA, 21 nt, Artificial Sequence
  SAMD9L targeting guide sequence portion
aucaaacuugcccuaaagagc

SEQ ID NO: 5758 - RNA, 21 nt, Artificial Sequence
  SAMD9L targeting guide sequence portion
aucuuuuauuggcucuuuagg

SEQ ID NO: 5759 - RNA, 21 nt, Artificial Sequence
  SAMD9L targeting guide sequence portion
auuggcucuuuagggcaaguu

SEQ ID NO: 5760 - RNA, 21 nt, Artificial Sequence
  SAMD9L targeting guide sequence portion
caaaaaucuuuuauuggcucu

SEQ ID NO: 5761 - RNA, 21 nt, Artificial Sequence
  SAMD9L targeting guide sequence portion
caaacuugcccuaaagagcca

SEQ ID NO: 5762 - RNA, 21 nt, Artificial Sequence
  SAMD9L targeting guide sequence portion
ccaaaaaucuuuuauuggcuc

SEQ ID NO: 5763 - RNA, 21 nt, Artificial Sequence
  SAMD9L targeting guide sequence portion
cccaaaaaucuuuuauuggcu

SEQ ID NO: 5764 - RNA, 21 nt, Artificial Sequence
  SAMD9L targeting guide sequence portion
cccuaaagagccaauaaaaga

SEQ ID NO: 5765 - RNA, 21 nt, Artificial Sequence
  SAMD9L targeting guide sequence portion
ccuaaagagccaauaaaagau

SEQ ID NO: 5766 - RNA, 21 nt, Artificial Sequence
  SAMD9L targeting guide sequence portion
ccuuuaaagaaucaaacuugc

SEQ ID NO: 5767 - RNA, 21 nt, Artificial Sequence
  SAMD9L targeting guide sequence portion
cuaaagagccaauaaaagauu

SEQ ID NO: 5768 - RNA, 21 nt, Artificial Sequence
  SAMD9L targeting guide sequence portion
cucuuuagggcaaguuugauu

SEQ ID NO: 5769 - RNA, 21 nt, Artificial Sequence
  SAMD9L targeting guide sequence portion
cuugcccuaaagagccaauaa

SEQ ID NO: 5770 - RNA, 21 nt, Artificial Sequence
  SAMD9L targeting guide sequence portion
cuuuaaagaaucaaacuugcc

SEQ ID NO: 5771 - RNA, 21 nt, Artificial Sequence
  SAMD9L targeting guide sequence portion
cuuuagggcaaguuugauucu

SEQ ID NO: 5772 - RNA, 21 nt, Artificial Sequence
  SAMD9L targeting guide sequence portion
cuuuuauuggcucuuuagggc

SEQ ID NO: 5773 - RNA, 21 nt, Artificial Sequence
  SAMD9L targeting guide sequence portion
gaaucaaacuugcccuaaaga

SEQ ID NO: 5774 - RNA, 21 nt, Artificial Sequence
  SAMD9L targeting guide sequence portion
gcccuaaagagccaauaaaag

SEQ ID NO: 5775 - RNA, 21 nt, Artificial Sequence
  SAMD9L targeting guide sequence portion
gcucuuuagggcaaguuugau

SEQ ID NO: 5776 - RNA, 21 nt, Artificial Sequence
  SAMD9L targeting guide sequence portion
ggcucuuuagggcaaguuuga

SEQ ID NO: 5777 - RNA, 21 nt, Artificial Sequence
  SAMD9L targeting guide sequence portion
uaaagaaucaaacuugcccua

SEQ ID NO: 5778 - RNA, 21 nt, Artificial Sequence
  SAMD9L targeting guide sequence portion
uaaagagccaauaaaagauuu

SEQ ID NO: 5779 - RNA, 21 nt, Artificial Sequence
  SAMD9L targeting guide sequence portion
uauuggcucuuuagggcaagu

SEQ ID NO: 5780 - RNA, 21 nt, Artificial Sequence
  SAMD9L targeting guide sequence portion
ucaaacuugcccuaaagagcc

SEQ ID NO: 5781 - RNA, 21 nt, Artificial Sequence
  SAMD9L targeting guide sequence portion
ucccaaaaaucuuuuauuggc

SEQ ID NO: 5782 - RNA, 21 nt, Artificial Sequence
  SAMD9L targeting guide sequence portion
uccuuuaaagaaucaaacuug

SEQ ID NO: 5783 - RNA, 21 nt, Artificial Sequence
  SAMD9L targeting guide sequence portion
ucuuuagggcaaguuugauuc

SEQ ID NO: 5784 - RNA, 21 nt, Artificial Sequence
  SAMD9L targeting guide sequence portion
ucuuuuauuggcucuuuaggg

SEQ ID NO: 5785 - RNA, 21 nt, Artificial Sequence
  SAMD9L targeting guide sequence portion
ugcccuaaagagccaauaaaa

SEQ ID NO: 5786 - RNA, 21 nt, Artificial Sequence
  SAMD9L targeting guide sequence portion
uggcucuuuagggcaaguuug

SEQ ID NO: 5787 - RNA, 21 nt, Artificial Sequence
  SAMD9L targeting guide sequence portion
uuaaagaaucaaacuugcccu

SEQ ID NO: 5788 - RNA, 21 nt, Artificial Sequence
  SAMD9L targeting guide sequence portion
uuagggcaaguuugauucuuu

SEQ ID NO: 5789 - RNA, 21 nt, Artificial Sequence
  SAMD9L targeting guide sequence portion
uuauuggcucuuuagggcaag

SEQ ID NO: 5790 - RNA, 21 nt, Artificial Sequence
  SAMD9L targeting guide sequence portion
uucccaaaaaucuuuuauugg

SEQ ID NO: 5791 - RNA, 21 nt, Artificial Sequence
  SAMD9L targeting guide sequence portion
uugcccuaaagagccaauaaa

SEQ ID NO: 5792 - RNA, 21 nt, Artificial Sequence
  SAMD9L targeting guide sequence portion
uuggcucuuuagggcaaguuu

SEQ ID NO: 5793 - RNA, 21 nt, Artificial Sequence
  SAMD9L targeting guide sequence portion
uuuaaagaaucaaacuugccc

SEQ ID NO: 5794 - RNA, 21 nt, Artificial Sequence
  SAMD9L targeting guide sequence portion
uuuagggcaaguuugauucuu

SEQ ID NO: 5795 - RNA, 21 nt, Artificial Sequence
  SAMD9L targeting guide sequence portion
uuuauuggcucuuuagggcaa

SEQ ID NO: 5796 - RNA, 21 nt, Artificial Sequence
  SAMD9L targeting guide sequence portion
uuucccaaaaaucuuuuauug

SEQ ID NO: 5797 - RNA, 21 nt, Artificial Sequence
  SAMD9L targeting guide sequence portion
uuuuauuggcucuuuagggca

SEQ ID NO: 5798 - RNA, 22 nt, Artificial Sequence
  SAMD9L targeting guide sequence portion
aaaaaucuuuuauuggcucuuu

SEQ ID NO: 5799 - RNA, 22 nt, Artificial Sequence
  SAMD9L targeting guide sequence portion
aaaaucuuuuauuggcucuuua

SEQ ID NO: 5800 - RNA, 22 nt, Artificial Sequence
  SAMD9L targeting guide sequence portion
aaacuugcccuaaagagccaau

SEQ ID NO: 5801 - RNA, 22 nt, Artificial Sequence
  SAMD9L targeting guide sequence portion
aaagaaucaaacuugcccuaaa

SEQ ID NO: 5802 - RNA, 22 nt, Artificial Sequence
  SAMD9L targeting guide sequence portion
aaagagccaauaaaagauuuuu

SEQ ID NO: 5803 - RNA, 22 nt, Artificial Sequence
  SAMD9L targeting guide sequence portion
aaaucuuuuauuggcucuuuag

SEQ ID NO: 5804 - RNA, 22 nt, Artificial Sequence
  SAMD9L targeting guide sequence portion
aacuugcccuaaagagccaaua

SEQ ID NO: 5805 - RNA, 22 nt, Artificial Sequence
  SAMD9L targeting guide sequence portion
aagaaucaaacuugcccuaaag

SEQ ID NO: 5806 - RNA, 22 nt, Artificial Sequence
  SAMD9L targeting guide sequence portion
aagagccaauaaaagauuuuug

SEQ ID NO: 5807 - RNA, 22 nt, Artificial Sequence
  SAMD9L targeting guide sequence portion
aaucaaacuugcccuaaagagc

SEQ ID NO: 5808 - RNA, 22 nt, Artificial Sequence
  SAMD9L targeting guide sequence portion
aaucuuuuauuggcucuuuagg

SEQ ID NO: 5809 - RNA, 22 nt, Artificial Sequence
  SAMD9L targeting guide sequence portion
acuugcccuaaagagccaauaa

SEQ ID NO: 5810 - RNA, 22 nt, Artificial Sequence
  SAMD9L targeting guide sequence portion
agaaucaaacuugcccuaaaga

SEQ ID NO: 5811 - RNA, 22 nt, Artificial Sequence
  SAMD9L targeting guide sequence portion
aucaaacuugcccuaaagagcc

SEQ ID NO: 5812 - RNA, 22 nt, Artificial Sequence
  SAMD9L targeting guide sequence portion
aucuuuuauuggcucuuuaggg

SEQ ID NO: 5813 - RNA, 22 nt, Artificial Sequence
  SAMD9L targeting guide sequence portion
auuggcucuuuagggcaaguuu

SEQ ID NO: 5814 - RNA, 22 nt, Artificial Sequence
  SAMD9L targeting guide sequence portion
caaaaaucuuuuauuggcucuu

SEQ ID NO: 5815 - RNA, 22 nt, Artificial Sequence
  SAMD9L targeting guide sequence portion
caaacuugcccuaaagagccaa

SEQ ID NO: 5816 - RNA, 22 nt, Artificial Sequence
  SAMD9L targeting guide sequence portion
ccaaaaaucuuuuauuggcucu

SEQ ID NO: 5817 - RNA, 22 nt, Artificial Sequence
  SAMD9L targeting guide sequence portion
cccaaaaaucuuuuauuggcuc

SEQ ID NO: 5818 - RNA, 22 nt, Artificial Sequence
  SAMD9L targeting guide sequence portion
cccuaaagagccaauaaaagau

SEQ ID NO: 5819 - RNA, 22 nt, Artificial Sequence
  SAMD9L targeting guide sequence portion
ccuaaagagccaauaaaagauu

SEQ ID NO: 5820 - RNA, 22 nt, Artificial Sequence
  SAMD9L targeting guide sequence portion
ccuuuaaagaaucaaacuugcc

SEQ ID NO: 5821 - RNA, 22 nt, Artificial Sequence
  SAMD9L targeting guide sequence portion
cuaaagagccaauaaaagauuu

SEQ ID NO: 5822 - RNA, 22 nt, Artificial Sequence
  SAMD9L targeting guide sequence portion
cucuuuagggcaaguuugauuc

SEQ ID NO: 5823 - RNA, 22 nt, Artificial Sequence
  SAMD9L targeting guide sequence portion
cuugcccuaaagagccaauaaa

SEQ ID NO: 5824 - RNA, 22 nt, Artificial Sequence
  SAMD9L targeting guide sequence portion
cuuuaaagaaucaaacuugccc

SEQ ID NO: 5825 - RNA, 22 nt, Artificial Sequence
  SAMD9L targeting guide sequence portion
cuuuagggcaaguuugauucuu

SEQ ID NO: 5826 - RNA, 22 nt, Artificial Sequence
  SAMD9L targeting guide sequence portion
cuuuuauuggcucuuuagggca

SEQ ID NO: 5827 - RNA, 22 nt, Artificial Sequence
  SAMD9L targeting guide sequence portion
gaaucaaacuugcccuaaagag

SEQ ID NO: 5828 - RNA, 22 nt, Artificial Sequence
  SAMD9L targeting guide sequence portion
gcccuaaagagccaauaaaaga

SEQ ID NO: 5829 - RNA, 22 nt, Artificial Sequence
  SAMD9L targeting guide sequence portion
gcucuuuagggcaaguuugauu

SEQ ID NO: 5830 - RNA, 22 nt, Artificial Sequence
  SAMD9L targeting guide sequence portion
ggcucuuuagggcaaguuugau

SEQ ID NO: 5831 - RNA, 22 nt, Artificial Sequence
  SAMD9L targeting guide sequence portion
uaaagaaucaaacuugcccuaa

SEQ ID NO: 5832 - RNA, 22 nt, Artificial Sequence
  SAMD9L targeting guide sequence portion
uaaagagccaauaaaagauuuu

SEQ ID NO: 5833 - RNA, 22 nt, Artificial Sequence
  SAMD9L targeting guide sequence portion
uauuggcucuuuagggcaaguu

SEQ ID NO: 5834 - RNA, 22 nt, Artificial Sequence
  SAMD9L targeting guide sequence portion
ucaaacuugcccuaaagagcca

SEQ ID NO: 5835 - RNA, 22 nt, Artificial Sequence
  SAMD9L targeting guide sequence portion
ucccaaaaaucuuuuauuggcu

SEQ ID NO: 5836 - RNA, 22 nt, Artificial Sequence
  SAMD9L targeting guide sequence portion
uccuuuaaagaaucaaacuugc

SEQ ID NO: 5837 - RNA, 22 nt, Artificial Sequence
  SAMD9L targeting guide sequence portion
ucuuuagggcaaguuugauucu

SEQ ID NO: 5838 - RNA, 22 nt, Artificial Sequence
  SAMD9L targeting guide sequence portion
ucuuuuauuggcucuuuagggc

SEQ ID NO: 5839 - RNA, 22 nt, Artificial Sequence
  SAMD9L targeting guide sequence portion
ugcccuaaagagccaauaaaag

SEQ ID NO: 5840 - RNA, 22 nt, Artificial Sequence
  SAMD9L targeting guide sequence portion
uggcucuuuagggcaaguuuga

SEQ ID NO: 5841 - RNA, 22 nt, Artificial Sequence
  SAMD9L targeting guide sequence portion
uuaaagaaucaaacuugcccua

SEQ ID NO: 5842 - RNA, 22 nt, Artificial Sequence
  SAMD9L targeting guide sequence portion
uuagggcaaguuugauucuuua

SEQ ID NO: 5843 - RNA, 22 nt, Artificial Sequence
  SAMD9L targeting guide sequence portion
uuauuggcucuuuagggcaagu

SEQ ID NO: 5844 - RNA, 22 nt, Artificial Sequence
  SAMD9L targeting guide sequence portion
uucccaaaaaucuuuuauuggc

SEQ ID NO: 5845 - RNA, 22 nt, Artificial Sequence
  SAMD9L targeting guide sequence portion
uuccuuuaaagaaucaaacuug

SEQ ID NO: 5846 - RNA, 22 nt, Artificial Sequence
  SAMD9L targeting guide sequence portion
uugcccuaaagagccaauaaaa

SEQ ID NO: 5847 - RNA, 22 nt, Artificial Sequence
  SAMD9L targeting guide sequence portion
uuggcucuuuagggcaaguuug

SEQ ID NO: 5848 - RNA, 22 nt, Artificial Sequence
  SAMD9L targeting guide sequence portion
uuuaaagaaucaaacuugcccu

SEQ ID NO: 5849 - RNA, 22 nt, Artificial Sequence
  SAMD9L targeting guide sequence portion
uuuagggcaaguuugauucuuu

SEQ ID NO: 5850 - RNA, 22 nt, Artificial Sequence
  SAMD9L targeting guide sequence portion
uuuauuggcucuuuagggcaag

SEQ ID NO: 5851 - RNA, 22 nt, Artificial Sequence
  SAMD9L targeting guide sequence portion
uuucccaaaaaucuuuuauugg

SEQ ID NO: 5852 - RNA, 22 nt, Artificial Sequence
  SAMD9L targeting guide sequence portion
uuuuauuggcucuuuagggcaa

SEQ ID NO: 5853 - RNA, 22 nt, Artificial Sequence
  SAMD9L targeting guide sequence portion
uuuucccaaaaaucuuuuauug

SEQ ID NO: 5854 - RNA, 20 nt, Artificial Sequence
  SAMD9L targeting guide sequence portion
aaaaucuuuuauuggcucua

SEQ ID NO: 5855 - RNA, 20 nt, Artificial Sequence
  SAMD9L targeting guide sequence portion
aaacuugcccuauagagcca

SEQ ID NO: 5856 - RNA, 20 nt, Artificial Sequence
  SAMD9L targeting guide sequence portion
aaaucuuuuauuggcucuau

SEQ ID NO: 5857 - RNA, 20 nt, Artificial Sequence
  SAMD9L targeting guide sequence portion
aacuugcccuauagagccaa

SEQ ID NO: 5858 - RNA, 20 nt, Artificial Sequence
  SAMD9L targeting guide sequence portion
aagaaucaaacuugcccuau

SEQ ID NO: 5859 - RNA, 20 nt, Artificial Sequence
  SAMD9L targeting guide sequence portion
aaucaaacuugcccuauaga

SEQ ID NO: 5860 - RNA, 20 nt, Artificial Sequence
  SAMD9L targeting guide sequence portion
aaucuuuuauuggcucuaua

SEQ ID NO: 5861 - RNA, 20 nt, Artificial Sequence
  SAMD9L targeting guide sequence portion
acuugcccuauagagccaau

SEQ ID NO: 5862 - RNA, 20 nt, Artificial Sequence
  SAMD9L targeting guide sequence portion
agaaucaaacuugcccuaua

SEQ ID NO: 5863 - RNA, 20 nt, Artificial Sequence
  SAMD9L targeting guide sequence portion
auagagccaauaaaagauuu

SEQ ID NO: 5864 - RNA, 20 nt, Artificial Sequence
  SAMD9L targeting guide sequence portion
auagggcaaguuugauucuu

SEQ ID NO: 5865 - RNA, 20 nt, Artificial Sequence
  SAMD9L targeting guide sequence portion
aucaaacuugcccuauagag

SEQ ID NO: 5866 - RNA, 20 nt, Artificial Sequence
  SAMD9L targeting guide sequence portion
aucuuuuauuggcucuauag

SEQ ID NO: 5867 - RNA, 20 nt, Artificial Sequence
  SAMD9L targeting guide sequence portion
auuggcucuauagggcaagu

SEQ ID NO: 5868 - RNA, 20 nt, Artificial Sequence
  SAMD9L targeting guide sequence portion
caaacuugcccuauagagcc

SEQ ID NO: 5869 - RNA, 20 nt, Artificial Sequence
  SAMD9L targeting guide sequence portion
cccuauagagccaauaaaag

SEQ ID NO: 5870 - RNA, 20 nt, Artificial Sequence
  SAMD9L targeting guide sequence portion
ccuauagagccaauaaaaga

SEQ ID NO: 5871 - RNA, 20 nt, Artificial Sequence
  SAMD9L targeting guide sequence portion
cuauagagccaauaaaagau

SEQ ID NO: 5872 - RNA, 20 nt, Artificial Sequence
  SAMD9L targeting guide sequence portion
cuauagggcaaguuugauuc

SEQ ID NO: 5873 - RNA, 20 nt, Artificial Sequence
  SAMD9L targeting guide sequence portion
cucuauagggcaaguuugau

SEQ ID NO: 5874 - RNA, 20 nt, Artificial Sequence
  SAMD9L targeting guide sequence portion
cuugcccuauagagccaaua

SEQ ID NO: 5875 - RNA, 20 nt, Artificial Sequence
  SAMD9L targeting guide sequence portion
cuuuuauuggcucuauaggg

SEQ ID NO: 5876 - RNA, 20 nt, Artificial Sequence
  SAMD9L targeting guide sequence portion
gaaucaaacuugcccuauag

SEQ ID NO: 5877 - RNA, 20 nt, Artificial Sequence
  SAMD9L targeting guide sequence portion
gcccuauagagccaauaaaa

SEQ ID NO: 5878 - RNA, 20 nt, Artificial Sequence
  SAMD9L targeting guide sequence portion
gcucuauagggcaaguuuga

SEQ ID NO: 5879 - RNA, 20 nt, Artificial Sequence
  SAMD9L targeting guide sequence portion
ggcucuauagggcaaguuug

SEQ ID NO: 5880 - RNA, 20 nt, Artificial Sequence
  SAMD9L targeting guide sequence portion
uagagccaauaaaagauuuu

SEQ ID NO: 5881 - RNA, 20 nt, Artificial Sequence
  SAMD9L targeting guide sequence portion
uauagagccaauaaaagauu

SEQ ID NO: 5882 - RNA, 20 nt, Artificial Sequence
  SAMD9L targeting guide sequence portion
uauagggcaaguuugauucu

SEQ ID NO: 5883 - RNA, 20 nt, Artificial Sequence
  SAMD9L targeting guide sequence portion
uauuggcucuauagggcaag

SEQ ID NO: 5884 - RNA, 20 nt, Artificial Sequence
  SAMD9L targeting guide sequence portion
ucaaacuugcccuauagagc

SEQ ID NO: 5885 - RNA, 20 nt, Artificial Sequence
  SAMD9L targeting guide sequence portion
ucuauagggcaaguuugauu

SEQ ID NO: 5886 - RNA, 20 nt, Artificial Sequence
  SAMD9L targeting guide sequence portion
ucuuuuauuggcucuauagg

SEQ ID NO: 5887 - RNA, 20 nt, Artificial Sequence
  SAMD9L targeting guide sequence portion
ugcccuauagagccaauaaa

SEQ ID NO: 5888 - RNA, 20 nt, Artificial Sequence
  SAMD9L targeting guide sequence portion
uggcucuauagggcaaguuu

SEQ ID NO: 5889 - RNA, 20 nt, Artificial Sequence
  SAMD9L targeting guide sequence portion
uuauuggcucuauagggcaa

SEQ ID NO: 5890 - RNA, 20 nt, Artificial Sequence
  SAMD9L targeting guide sequence portion
uugcccuauagagccaauaa

SEQ ID NO: 5891 - RNA, 20 nt, Artificial Sequence
  SAMD9L targeting guide sequence portion
uuggcucuauagggcaaguu

SEQ ID NO: 5892 - RNA, 20 nt, Artificial Sequence
  SAMD9L targeting guide sequence portion
uuuauuggcucuauagggca

SEQ ID NO: 5893 - RNA, 20 nt, Artificial Sequence
  SAMD9L targeting guide sequence portion
uuuuauuggcucuauagggc

SEQ ID NO: 5894 - RNA, 21 nt, Artificial Sequence
  SAMD9L targeting guide sequence portion
aaaaaucuuuuauuggcucua

SEQ ID NO: 5895 - RNA, 21 nt, Artificial Sequence
  SAMD9L targeting guide sequence portion
aaaaucuuuuauuggcucuau

SEQ ID NO: 5896 - RNA, 21 nt, Artificial Sequence
  SAMD9L targeting guide sequence portion
aaacuugcccuauagagccaa

SEQ ID NO: 5897 - RNA, 21 nt, Artificial Sequence
  SAMD9L targeting guide sequence portion
aaagaaucaaacuugcccuau

SEQ ID NO: 5898 - RNA, 21 nt, Artificial Sequence
  SAMD9L targeting guide sequence portion
aaaucuuuuauuggcucuaua

SEQ ID NO: 5899 - RNA, 21 nt, Artificial Sequence
  SAMD9L targeting guide sequence portion
aacuugcccuauagagccaau

SEQ ID NO: 5900 - RNA, 21 nt, Artificial Sequence
  SAMD9L targeting guide sequence portion
aagaaucaaacuugcccuaua

SEQ ID NO: 5901 - RNA, 21 nt, Artificial Sequence
  SAMD9L targeting guide sequence portion
aaucaaacuugcccuauagag

SEQ ID NO: 5902 - RNA, 21 nt, Artificial Sequence
  SAMD9L targeting guide sequence portion
aaucuuuuauuggcucuauag

SEQ ID NO: 5903 - RNA, 21 nt, Artificial Sequence
  SAMD9L targeting guide sequence portion
acuugcccuauagagccaaua

SEQ ID NO: 5904 - RNA, 21 nt, Artificial Sequence
  SAMD9L targeting guide sequence portion
agaaucaaacuugcccuauag

SEQ ID NO: 5905 - RNA, 21 nt, Artificial Sequence
  SAMD9L targeting guide sequence portion
auagagccaauaaaagauuuu

SEQ ID NO: 5906 - RNA, 21 nt, Artificial Sequence
  SAMD9L targeting guide sequence portion
auagggcaaguuugauucuuu

SEQ ID NO: 5907 - RNA, 21 nt, Artificial Sequence
  SAMD9L targeting guide sequence portion
aucaaacuugcccuauagagc

SEQ ID NO: 5908 - RNA, 21 nt, Artificial Sequence
  SAMD9L targeting guide sequence portion
aucuuuuauuggcucuauagg

SEQ ID NO: 5909 - RNA, 21 nt, Artificial Sequence
  SAMD9L targeting guide sequence portion
auuggcucuauagggcaaguu

SEQ ID NO: 5910 - RNA, 21 nt, Artificial Sequence
  SAMD9L targeting guide sequence portion
caaacuugcccuauagagcca

SEQ ID NO: 5911 - RNA, 21 nt, Artificial Sequence
  SAMD9L targeting guide sequence portion
cccuauagagccaauaaaaga

SEQ ID NO: 5912 - RNA, 21 nt, Artificial Sequence
  SAMD9L targeting guide sequence portion
ccuauagagccaauaaaagau

SEQ ID NO: 5913 - RNA, 21 nt, Artificial Sequence
  SAMD9L targeting guide sequence portion
cuauagagccaauaaaagauu

SEQ ID NO: 5914 - RNA, 21 nt, Artificial Sequence
  SAMD9L targeting guide sequence portion
cuauagggcaaguuugauucu

SEQ ID NO: 5915 - RNA, 21 nt, Artificial Sequence
  SAMD9L targeting guide sequence portion
cucuauagggcaaguuugauu

SEQ ID NO: 5916 - RNA, 21 nt, Artificial Sequence
  SAMD9L targeting guide sequence portion
cuugcccuauagagccaauaa

SEQ ID NO: 5917 - RNA, 21 nt, Artificial Sequence
  SAMD9L targeting guide sequence portion
cuuuuauuggcucuauagggc

SEQ ID NO: 5918 - RNA, 21 nt, Artificial Sequence
  SAMD9L targeting guide sequence portion
gaaucaaacuugcccuauaga

SEQ ID NO: 5919 - RNA, 21 nt, Artificial Sequence
  SAMD9L targeting guide sequence portion
gcccuauagagccaauaaaag

SEQ ID NO: 5920 - RNA, 21 nt, Artificial Sequence
  SAMD9L targeting guide sequence portion
gcucuauagggcaaguuugau

SEQ ID NO: 5921 - RNA, 21 nt, Artificial Sequence
  SAMD9L targeting guide sequence portion
ggcucuauagggcaaguuuga

SEQ ID NO: 5922 - RNA, 21 nt, Artificial Sequence
  SAMD9L targeting guide sequence portion
uagagccaauaaaagauuuuu

SEQ ID NO: 5923 - RNA, 21 nt, Artificial Sequence
  SAMD9L targeting guide sequence portion
uauagagccaauaaaagauuu

SEQ ID NO: 5924 - RNA, 21 nt, Artificial Sequence
  SAMD9L targeting guide sequence portion
uauagggcaaguuugauucuu

SEQ ID NO: 5925 - RNA, 21 nt, Artificial Sequence
  SAMD9L targeting guide sequence portion
uauuggcucuauagggcaagu

SEQ ID NO: 5926 - RNA, 21 nt, Artificial Sequence
  SAMD9L targeting guide sequence portion
ucaaacuugcccuauagagcc

SEQ ID NO: 5927 - RNA, 21 nt, Artificial Sequence
  SAMD9L targeting guide sequence portion
ucuauagggcaaguuugauuc

SEQ ID NO: 5928 - RNA, 21 nt, Artificial Sequence
  SAMD9L targeting guide sequence portion
ucuuuuauuggcucuauaggg

SEQ ID NO: 5929 - RNA, 21 nt, Artificial Sequence
  SAMD9L targeting guide sequence portion
ugcccuauagagccaauaaaa

SEQ ID NO: 5930 - RNA, 21 nt, Artificial Sequence
  SAMD9L targeting guide sequence portion
uggcucuauagggcaaguuug

SEQ ID NO: 5931 - RNA, 21 nt, Artificial Sequence
  SAMD9L targeting guide sequence portion
uuauuggcucuauagggcaag

SEQ ID NO: 5932 - RNA, 21 nt, Artificial Sequence
  SAMD9L targeting guide sequence portion
uugcccuauagagccaauaaa

SEQ ID NO: 5933 - RNA, 21 nt, Artificial Sequence
  SAMD9L targeting guide sequence portion
uuggcucuauagggcaaguuu

SEQ ID NO: 5934 - RNA, 21 nt, Artificial Sequence
  SAMD9L targeting guide sequence portion
uuuauuggcucuauagggcaa

SEQ ID NO: 5935 - RNA, 21 nt, Artificial Sequence
  SAMD9L targeting guide sequence portion
uuuuauuggcucuauagggca

SEQ ID NO: 5936 - RNA, 22 nt, Artificial Sequence
  SAMD9L targeting guide sequence portion
aaaaaucuuuuauuggcucuau

SEQ ID NO: 5937 - RNA, 22 nt, Artificial Sequence
  SAMD9L targeting guide sequence portion
aaaaucuuuuauuggcucuaua

SEQ ID NO: 5938 - RNA, 22 nt, Artificial Sequence
  SAMD9L targeting guide sequence portion
aaacuugcccuauagagccaau

SEQ ID NO: 5939 - RNA, 22 nt, Artificial Sequence
  SAMD9L targeting guide sequence portion
aaagaaucaaacuugcccuaua

SEQ ID NO: 5940 - RNA, 22 nt, Artificial Sequence
  SAMD9L targeting guide sequence portion
aaaucuuuuauuggcucuauag

SEQ ID NO: 5941 - RNA, 22 nt, Artificial Sequence
  SAMD9L targeting guide sequence portion
aacuugcccuauagagccaaua

SEQ ID NO: 5942 - RNA, 22 nt, Artificial Sequence
  SAMD9L targeting guide sequence portion
aagaaucaaacuugcccuauag

SEQ ID NO: 5943 - RNA, 22 nt, Artificial Sequence
  SAMD9L targeting guide sequence portion
aaucaaacuugcccuauagagc

SEQ ID NO: 5944 - RNA, 22 nt, Artificial Sequence
  SAMD9L targeting guide sequence portion
aaucuuuuauuggcucuauagg

SEQ ID NO: 5945 - RNA, 22 nt, Artificial Sequence
  SAMD9L targeting guide sequence portion
acuugcccuauagagccaauaa

SEQ ID NO: 5946 - RNA, 22 nt, Artificial Sequence
  SAMD9L targeting guide sequence portion
agaaucaaacuugcccuauaga

SEQ ID NO: 5947 - RNA, 22 nt, Artificial Sequence
  SAMD9L targeting guide sequence portion
auagagccaauaaaagauuuuu

SEQ ID NO: 5948 - RNA, 22 nt, Artificial Sequence
  SAMD9L targeting guide sequence portion
auagggcaaguuugauucuuua

SEQ ID NO: 5949 - RNA, 22 nt, Artificial Sequence
  SAMD9L targeting guide sequence portion
aucaaacuugcccuauagagcc

SEQ ID NO: 5950 - RNA, 22 nt, Artificial Sequence
  SAMD9L targeting guide sequence portion
aucuuuuauuggcucuauaggg

SEQ ID NO: 5951 - RNA, 22 nt, Artificial Sequence
  SAMD9L targeting guide sequence portion
auuggcucuauagggcaaguuu

SEQ ID NO: 5952 - RNA, 22 nt, Artificial Sequence
  SAMD9L targeting guide sequence portion
caaaaaucuuuuauuggcucua

SEQ ID NO: 5953 - RNA, 22 nt, Artificial Sequence
  SAMD9L targeting guide sequence portion
caaacuugcccuauagagccaa

SEQ ID NO: 5954 - RNA, 22 nt, Artificial Sequence
  SAMD9L targeting guide sequence portion
cccuauagagccaauaaaagau

SEQ ID NO: 5955 - RNA, 22 nt, Artificial Sequence
  SAMD9L targeting guide sequence portion
ccuauagagccaauaaaagauu

SEQ ID NO: 5956 - RNA, 22 nt, Artificial Sequence
  SAMD9L targeting guide sequence portion
cuauagagccaauaaaagauuu

SEQ ID NO: 5957 - RNA, 22 nt, Artificial Sequence
  SAMD9L targeting guide sequence portion
cuauagggcaaguuugauucuu

SEQ ID NO: 5958 - RNA, 22 nt, Artificial Sequence
  SAMD9L targeting guide sequence portion
cucuauagggcaaguuugauuc

SEQ ID NO: 5959 - RNA, 22 nt, Artificial Sequence
  SAMD9L targeting guide sequence portion
cuugcccuauagagccaauaaa

SEQ ID NO: 5960 - RNA, 22 nt, Artificial Sequence
  SAMD9L targeting guide sequence portion
cuuuuauuggcucuauagggca

SEQ ID NO: 5961 - RNA, 22 nt, Artificial Sequence
  SAMD9L targeting guide sequence portion
gaaucaaacuugcccuauagag

SEQ ID NO: 5962 - RNA, 22 nt, Artificial Sequence
  SAMD9L targeting guide sequence portion
gcccuauagagccaauaaaaga

SEQ ID NO: 5963 - RNA, 22 nt, Artificial Sequence
  SAMD9L targeting guide sequence portion
gcucuauagggcaaguuugauu

SEQ ID NO: 5964 - RNA, 22 nt, Artificial Sequence
  SAMD9L targeting guide sequence portion
ggcucuauagggcaaguuugau

SEQ ID NO: 5965 - RNA, 22 nt, Artificial Sequence
  SAMD9L targeting guide sequence portion
uaaagaaucaaacuugcccuau

SEQ ID NO: 5966 - RNA, 22 nt, Artificial Sequence
  SAMD9L targeting guide sequence portion
uagagccaauaaaagauuuuug

SEQ ID NO: 5967 - RNA, 22 nt, Artificial Sequence
  SAMD9L targeting guide sequence portion
uauagagccaauaaaagauuuu

SEQ ID NO: 5968 - RNA, 22 nt, Artificial Sequence
  SAMD9L targeting guide sequence portion
uauagggcaaguuugauucuuu

SEQ ID NO: 5969 - RNA, 22 nt, Artificial Sequence
  SAMD9L targeting guide sequence portion
uauuggcucuauagggcaaguu

SEQ ID NO: 5970 - RNA, 22 nt, Artificial Sequence
  SAMD9L targeting guide sequence portion
ucaaacuugcccuauagagcca

SEQ ID NO: 5971 - RNA, 22 nt, Artificial Sequence
  SAMD9L targeting guide sequence portion
ucuauagggcaaguuugauucu

SEQ ID NO: 5972 - RNA, 22 nt, Artificial Sequence
  SAMD9L targeting guide sequence portion
ucuuuuauuggcucuauagggc

SEQ ID NO: 5973 - RNA, 22 nt, Artificial Sequence
  SAMD9L targeting guide sequence portion
ugcccuauagagccaauaaaag

SEQ ID NO: 5974 - RNA, 22 nt, Artificial Sequence
  SAMD9L targeting guide sequence portion
uggcucuauagggcaaguuuga

SEQ ID NO: 5975 - RNA, 22 nt, Artificial Sequence
  SAMD9L targeting guide sequence portion
uuauuggcucuauagggcaagu

SEQ ID NO: 5976 - RNA, 22 nt, Artificial Sequence
  SAMD9L targeting guide sequence portion
uugcccuauagagccaauaaaa

SEQ ID NO: 5977 - RNA, 22 nt, Artificial Sequence
  SAMD9L targeting guide sequence portion
uuggcucuauagggcaaguuug

SEQ ID NO: 5978 - RNA, 22 nt, Artificial Sequence
  SAMD9L targeting guide sequence portion
uuuauuggcucuauagggcaag

SEQ ID NO: 5979 - RNA, 22 nt, Artificial Sequence
  SAMD9L targeting guide sequence portion
uuuuauuggcucuauagggcaa

SEQ ID NO: 5980 - RNA, 20 nt, Artificial Sequence
  SAMD9L targeting guide sequence portion
aaagaaugacacuuuaugac

SEQ ID NO: 5981 - RNA, 20 nt, Artificial Sequence
  SAMD9L targeting guide sequence portion
aaagugucauucuuuauuua

SEQ ID NO: 5982 - RNA, 20 nt, Artificial Sequence
  SAMD9L targeting guide sequence portion
aaauaaagaaugacacuuua

SEQ ID NO: 5983 - RNA, 20 nt, Artificial Sequence
  SAMD9L targeting guide sequence portion
aagaaugacacuuuaugaca

SEQ ID NO: 5984 - RNA, 20 nt, Artificial Sequence
  SAMD9L targeting guide sequence portion
aagugucauucuuuauuuac

SEQ ID NO: 5985 - RNA, 20 nt, Artificial Sequence
  SAMD9L targeting guide sequence portion
aauaaagaaugacacuuuau

SEQ ID NO: 5986 - RNA, 20 nt, Artificial Sequence
  SAMD9L targeting guide sequence portion
aaugacacuuuaugacaggc

SEQ ID NO: 5987 - RNA, 20 nt, Artificial Sequence
  SAMD9L targeting guide sequence portion
acacuuuaugacaggcccag

SEQ ID NO: 5988 - RNA, 20 nt, Artificial Sequence
  SAMD9L targeting guide sequence portion
accugugguaaauaaagaau

SEQ ID NO: 5989 - RNA, 20 nt, Artificial Sequence
  SAMD9L targeting guide sequence portion
agaaugacacuuuaugacag

SEQ ID NO: 5990 - RNA, 20 nt, Artificial Sequence
  SAMD9L targeting guide sequence portion
agugucauucuuuauuuacc

SEQ ID NO: 5991 - RNA, 20 nt, Artificial Sequence
  SAMD9L targeting guide sequence portion
auaaagaaugacacuuuaug

SEQ ID NO: 5992 - RNA, 20 nt, Artificial Sequence
  SAMD9L targeting guide sequence portion
auaaagugucauucuuuauu

SEQ ID NO: 5993 - RNA, 20 nt, Artificial Sequence
  SAMD9L targeting guide sequence portion
augacacuuuaugacaggcc

SEQ ID NO: 5994 - RNA, 20 nt, Artificial Sequence
  SAMD9L targeting guide sequence portion
cauaaagugucauucuuuau

SEQ ID NO: 5995 - RNA, 20 nt, Artificial Sequence
  SAMD9L targeting guide sequence portion
cccugggccugucauaaagu

SEQ ID NO: 5996 - RNA, 20 nt, Artificial Sequence
  SAMD9L targeting guide sequence portion
ccugaccugugguaaauaaa

SEQ ID NO: 5997 - RNA, 20 nt, Artificial Sequence
  SAMD9L targeting guide sequence portion
ccugggccugucauaaagug

SEQ ID NO: 5998 - RNA, 20 nt, Artificial Sequence
  SAMD9L targeting guide sequence portion
ccugucauaaagugucauuc

SEQ ID NO: 5999 - RNA, 20 nt, Artificial Sequence
  SAMD9L targeting guide sequence portion
ccugugguaaauaaagaaug

SEQ ID NO: 6000 - RNA, 20 nt, Artificial Sequence
  SAMD9L targeting guide sequence portion
cugaccugugguaaauaaag

SEQ ID NO: 6001 - RNA, 20 nt, Artificial Sequence
  SAMD9L targeting guide sequence portion
cugggccugucauaaagugu

SEQ ID NO: 6002 - RNA, 20 nt, Artificial Sequence
  SAMD9L targeting guide sequence portion
cugucauaaagugucauucu

SEQ ID NO: 6003 - RNA, 20 nt, Artificial Sequence
  SAMD9L targeting guide sequence portion
cugugguaaauaaagaauga

SEQ ID NO: 6004 - RNA, 20 nt, Artificial Sequence
  SAMD9L targeting guide sequence portion
gaaugacacuuuaugacagg

SEQ ID NO: 6005 - RNA, 20 nt, Artificial Sequence
  SAMD9L targeting guide sequence portion
gacacuuuaugacaggccca

SEQ ID NO: 6006 - RNA, 20 nt, Artificial Sequence
  SAMD9L targeting guide sequence portion
gaccugugguaaauaaagaa

SEQ ID NO: 6007 - RNA, 20 nt, Artificial Sequence
  SAMD9L targeting guide sequence portion
gcccugggccugucauaaag

SEQ ID NO: 6008 - RNA, 20 nt, Artificial Sequence
  SAMD9L targeting guide sequence portion
gccugucauaaagugucauu

SEQ ID NO: 6009 - RNA, 20 nt, Artificial Sequence
  SAMD9L targeting guide sequence portion
ggcccugggccugucauaaa

SEQ ID NO: 6010 - RNA, 20 nt, Artificial Sequence
  SAMD9L targeting guide sequence portion
ggccugucauaaagugucau

SEQ ID NO: 6011 - RNA, 20 nt, Artificial Sequence
  SAMD9L targeting guide sequence portion
gggcccugggccugucauaa

SEQ ID NO: 6012 - RNA, 20 nt, Artificial Sequence
  SAMD9L targeting guide sequence portion
gggccugucauaaaguguca

SEQ ID NO: 6013 - RNA, 20 nt, Artificial Sequence
  SAMD9L targeting guide sequence portion
ggggcccugggccugucaua

SEQ ID NO: 6014 - RNA, 20 nt, Artificial Sequence
  SAMD9L targeting guide sequence portion
gguaaauaaagaaugacacu

SEQ ID NO: 6015 - RNA, 20 nt, Artificial Sequence
  SAMD9L targeting guide sequence portion
guaaauaaagaaugacacuu

SEQ ID NO: 6016 - RNA, 20 nt, Artificial Sequence
  SAMD9L targeting guide sequence portion
gucauaaagugucauucuuu

SEQ ID NO: 6017 - RNA, 20 nt, Artificial Sequence
  SAMD9L targeting guide sequence portion
gucauucuuuauuuaccaca

SEQ ID NO: 6018 - RNA, 20 nt, Artificial Sequence
  SAMD9L targeting guide sequence portion
gugguaaauaaagaaugaca

SEQ ID NO: 6019 - RNA, 20 nt, Artificial Sequence
  SAMD9L targeting guide sequence portion
gugucauucuuuauuuacca

SEQ ID NO: 6020 - RNA, 20 nt, Artificial Sequence
  SAMD9L targeting guide sequence portion
uaaagaaugacacuuuauga

SEQ ID NO: 6021 - RNA, 20 nt, Artificial Sequence
  SAMD9L targeting guide sequence portion
uaaagugucauucuuuauuu

SEQ ID NO: 6022 - RNA, 20 nt, Artificial Sequence
  SAMD9L targeting guide sequence portion
uaaauaaagaaugacacuuu

SEQ ID NO: 6023 - RNA, 20 nt, Artificial Sequence
  SAMD9L targeting guide sequence portion
ucauaaagugucauucuuua

SEQ ID NO: 6024 - RNA, 20 nt, Artificial Sequence
  SAMD9L targeting guide sequence portion
ucauucuuuauuuaccacag

SEQ ID NO: 6025 - RNA, 20 nt, Artificial Sequence
  SAMD9L targeting guide sequence portion
ugacacuuuaugacaggccc

SEQ ID NO: 6026 - RNA, 20 nt, Artificial Sequence
  SAMD9L targeting guide sequence portion
ugaccugugguaaauaaaga

SEQ ID NO: 6027 - RNA, 20 nt, Artificial Sequence
  SAMD9L targeting guide sequence portion
ugggccugucauaaaguguc

SEQ ID NO: 6028 - RNA, 20 nt, Artificial Sequence
  SAMD9L targeting guide sequence portion
ugguaaauaaagaaugacac

SEQ ID NO: 6029 - RNA, 20 nt, Artificial Sequence
  SAMD9L targeting guide sequence portion
ugucauaaagugucauucuu

SEQ ID NO: 6030 - RNA, 20 nt, Artificial Sequence
  SAMD9L targeting guide sequence portion
ugucauucuuuauuuaccac

SEQ ID NO: 6031 - RNA, 20 nt, Artificial Sequence
  SAMD9L targeting guide sequence portion
ugugguaaauaaagaaugac

SEQ ID NO: 6032 - RNA, 21 nt, Artificial Sequence
  SAMD9L targeting guide sequence portion
aaagaaugacacuuuaugaca

SEQ ID NO: 6033 - RNA, 21 nt, Artificial Sequence
  SAMD9L targeting guide sequence portion
aaagugucauucuuuauuuac

SEQ ID NO: 6034 - RNA, 21 nt, Artificial Sequence
  SAMD9L targeting guide sequence portion
aagaaugacacuuuaugacag

SEQ ID NO: 6035 - RNA, 21 nt, Artificial Sequence
  SAMD9L targeting guide sequence portion
aagugucauucuuuauuuacc

SEQ ID NO: 6036 - RNA, 21 nt, Artificial Sequence
  SAMD9L targeting guide sequence portion
aauaaagaaugacacuuuaug

SEQ ID NO: 6037 - RNA, 21 nt, Artificial Sequence
  SAMD9L targeting guide sequence portion
aaugacacuuuaugacaggcc

SEQ ID NO: 6038 - RNA, 21 nt, Artificial Sequence
  SAMD9L targeting guide sequence portion
acacuuuaugacaggcccagg

SEQ ID NO: 6039 - RNA, 21 nt, Artificial Sequence
  SAMD9L targeting guide sequence portion
accugugguaaauaaagaaug

SEQ ID NO: 6040 - RNA, 21 nt, Artificial Sequence
  SAMD9L targeting guide sequence portion
agaaugacacuuuaugacagg

SEQ ID NO: 6041 - RNA, 21 nt, Artificial Sequence
  SAMD9L targeting guide sequence portion
agugucauucuuuauuuacca

SEQ ID NO: 6042 - RNA, 21 nt, Artificial Sequence
  SAMD9L targeting guide sequence portion
auaaagaaugacacuuuauga

SEQ ID NO: 6043 - RNA, 21 nt, Artificial Sequence
  SAMD9L targeting guide sequence portion
augacacuuuaugacaggccc

SEQ ID NO: 6044 - RNA, 21 nt, Artificial Sequence
  SAMD9L targeting guide sequence portion
cauaaagugucauucuuuauu

SEQ ID NO: 6045 - RNA, 21 nt, Artificial Sequence
  SAMD9L targeting guide sequence portion
cccugggccugucauaaagug

SEQ ID NO: 6046 - RNA, 21 nt, Artificial Sequence
  SAMD9L targeting guide sequence portion
ccugaccugugguaaauaaag

SEQ ID NO: 6047 - RNA, 21 nt, Artificial Sequence
  SAMD9L targeting guide sequence portion
ccugggccugucauaaagugu

SEQ ID NO: 6048 - RNA, 21 nt, Artificial Sequence
  SAMD9L targeting guide sequence portion
ccugucauaaagugucauucu

SEQ ID NO: 6049 - RNA, 21 nt, Artificial Sequence
  SAMD9L targeting guide sequence portion
ccugugguaaauaaagaauga

SEQ ID NO: 6050 - RNA, 21 nt, Artificial Sequence
  SAMD9L targeting guide sequence portion
cugaccugugguaaauaaaga

SEQ ID NO: 6051 - RNA, 21 nt, Artificial Sequence
  SAMD9L targeting guide sequence portion
cugggccugucauaaaguguc

SEQ ID NO: 6052 - RNA, 21 nt, Artificial Sequence
  SAMD9L targeting guide sequence portion
cugucauaaagugucauucuu

SEQ ID NO: 6053 - RNA, 21 nt, Artificial Sequence
  SAMD9L targeting guide sequence portion
cugugguaaauaaagaaugac

SEQ ID NO: 6054 - RNA, 21 nt, Artificial Sequence
  SAMD9L targeting guide sequence portion
gaaugacacuuuaugacaggc

SEQ ID NO: 6055 - RNA, 21 nt, Artificial Sequence
  SAMD9L targeting guide sequence portion
gacacuuuaugacaggcccag

SEQ ID NO: 6056 - RNA, 21 nt, Artificial Sequence
  SAMD9L targeting guide sequence portion
gaccugugguaaauaaagaau

SEQ ID NO: 6057 - RNA, 21 nt, Artificial Sequence
  SAMD9L targeting guide sequence portion
gcccugggccugucauaaagu

SEQ ID NO: 6058 - RNA, 21 nt, Artificial Sequence
  SAMD9L targeting guide sequence portion
gccugucauaaagugucauuc

SEQ ID NO: 6059 - RNA, 21 nt, Artificial Sequence
  SAMD9L targeting guide sequence portion
ggcccugggccugucauaaag

SEQ ID NO: 6060 - RNA, 21 nt, Artificial Sequence
  SAMD9L targeting guide sequence portion
ggccugucauaaagugucauu

SEQ ID NO: 6061 - RNA, 21 nt, Artificial Sequence
  SAMD9L targeting guide sequence portion
gggcccugggccugucauaaa

SEQ ID NO: 6062 - RNA, 21 nt, Artificial Sequence
  SAMD9L targeting guide sequence portion
gggccugucauaaagugucau

SEQ ID NO: 6063 - RNA, 21 nt, Artificial Sequence
  SAMD9L targeting guide sequence portion
ggggcccugggccugucauaa

SEQ ID NO: 6064 - RNA, 21 nt, Artificial Sequence
  SAMD9L targeting guide sequence portion
gguaaauaaagaaugacacuu

SEQ ID NO: 6065 - RNA, 21 nt, Artificial Sequence
  SAMD9L targeting guide sequence portion
guaaauaaagaaugacacuuu

SEQ ID NO: 6066 - RNA, 21 nt, Artificial Sequence
  SAMD9L targeting guide sequence portion
gucauaaagugucauucuuua

SEQ ID NO: 6067 - RNA, 21 nt, Artificial Sequence
  SAMD9L targeting guide sequence portion
gucauucuuuauuuaccacag

SEQ ID NO: 6068 - RNA, 21 nt, Artificial Sequence
  SAMD9L targeting guide sequence portion
gugguaaauaaagaaugacac

SEQ ID NO: 6069 - RNA, 21 nt, Artificial Sequence
  SAMD9L targeting guide sequence portion
gugucauucuuuauuuaccac

SEQ ID NO: 6070 - RNA, 21 nt, Artificial Sequence
  SAMD9L targeting guide sequence portion
uaaagaaugacacuuuaugac

SEQ ID NO: 6071 - RNA, 21 nt, Artificial Sequence
  SAMD9L targeting guide sequence portion
ucauaaagugucauucuuuau

SEQ ID NO: 6072 - RNA, 21 nt, Artificial Sequence
  SAMD9L targeting guide sequence portion
ucauucuuuauuuaccacagg

SEQ ID NO: 6073 - RNA, 21 nt, Artificial Sequence
  SAMD9L targeting guide sequence portion
uccugaccugugguaaauaaa

SEQ ID NO: 6074 - RNA, 21 nt, Artificial Sequence
  SAMD9L targeting guide sequence portion
ugacacuuuaugacaggccca

SEQ ID NO: 6075 - RNA, 21 nt, Artificial Sequence
  SAMD9L targeting guide sequence portion
ugaccugugguaaauaaagaa

SEQ ID NO: 6076 - RNA, 21 nt, Artificial Sequence
  SAMD9L targeting guide sequence portion
ugggccugucauaaaguguca

SEQ ID NO: 6077 - RNA, 21 nt, Artificial Sequence
  SAMD9L targeting guide sequence portion
uggggcccugggccugucaua

SEQ ID NO: 6078 - RNA, 21 nt, Artificial Sequence
  SAMD9L targeting guide sequence portion
ugguaaauaaagaaugacacu

SEQ ID NO: 6079 - RNA, 21 nt, Artificial Sequence
  SAMD9L targeting guide sequence portion
ugucauaaagugucauucuuu

SEQ ID NO: 6080 - RNA, 21 nt, Artificial Sequence
  SAMD9L targeting guide sequence portion
ugucauucuuuauuuaccaca

SEQ ID NO: 6081 - RNA, 21 nt, Artificial Sequence
  SAMD9L targeting guide sequence portion
ugugguaaauaaagaaugaca

SEQ ID NO: 6082 - RNA, 22 nt, Artificial Sequence
  SAMD9L targeting guide sequence portion
aaagaaugacacuuuaugacag

SEQ ID NO: 6083 - RNA, 22 nt, Artificial Sequence
  SAMD9L targeting guide sequence portion
aaagugucauucuuuauuuacc

SEQ ID NO: 6084 - RNA, 22 nt, Artificial Sequence
  SAMD9L targeting guide sequence portion
aaauaaagaaugacacuuuaug

SEQ ID NO: 6085 - RNA, 22 nt, Artificial Sequence
  SAMD9L targeting guide sequence portion
aagaaugacacuuuaugacagg

SEQ ID NO: 6086 - RNA, 22 nt, Artificial Sequence
  SAMD9L targeting guide sequence portion
aagugucauucuuuauuuacca

SEQ ID NO: 6087 - RNA, 22 nt, Artificial Sequence
  SAMD9L targeting guide sequence portion
aauaaagaaugacacuuuauga

SEQ ID NO: 6088 - RNA, 22 nt, Artificial Sequence
  SAMD9L targeting guide sequence portion
aaugacacuuuaugacaggccc

SEQ ID NO: 6089 - RNA, 22 nt, Artificial Sequence
  SAMD9L targeting guide sequence portion
acacuuuaugacaggcccaggg

SEQ ID NO: 6090 - RNA, 22 nt, Artificial Sequence
  SAMD9L targeting guide sequence portion
accugugguaaauaaagaauga

SEQ ID NO: 6091 - RNA, 22 nt, Artificial Sequence
  SAMD9L targeting guide sequence portion
agaaugacacuuuaugacaggc

SEQ ID NO: 6092 - RNA, 22 nt, Artificial Sequence
  SAMD9L targeting guide sequence portion
agugucauucuuuauuuaccac

SEQ ID NO: 6093 - RNA, 22 nt, Artificial Sequence
  SAMD9L targeting guide sequence portion
auaaagaaugacacuuuaugac

SEQ ID NO: 6094 - RNA, 22 nt, Artificial Sequence
  SAMD9L targeting guide sequence portion
augacacuuuaugacaggccca

SEQ ID NO: 6095 - RNA, 22 nt, Artificial Sequence
  SAMD9L targeting guide sequence portion
cauaaagugucauucuuuauuu

SEQ ID NO: 6096 - RNA, 22 nt, Artificial Sequence
  SAMD9L targeting guide sequence portion
cccugggccugucauaaagugu

SEQ ID NO: 6097 - RNA, 22 nt, Artificial Sequence
  SAMD9L targeting guide sequence portion
ccugaccugugguaaauaaaga

SEQ ID NO: 6098 - RNA, 22 nt, Artificial Sequence
  SAMD9L targeting guide sequence portion
ccugggccugucauaaaguguc

SEQ ID NO: 6099 - RNA, 22 nt, Artificial Sequence
  SAMD9L targeting guide sequence portion
ccugucauaaagugucauucuu

SEQ ID NO: 6100 - RNA, 22 nt, Artificial Sequence
  SAMD9L targeting guide sequence portion
ccugugguaaauaaagaaugac

SEQ ID NO: 6101 - RNA, 22 nt, Artificial Sequence
  SAMD9L targeting guide sequence portion
cugaccugugguaaauaaagaa

SEQ ID NO: 6102 - RNA, 22 nt, Artificial Sequence
  SAMD9L targeting guide sequence portion
cugggccugucauaaaguguca

SEQ ID NO: 6103 - RNA, 22 nt, Artificial Sequence
  SAMD9L targeting guide sequence portion
cugucauaaagugucauucuuu

SEQ ID NO: 6104 - RNA, 22 nt, Artificial Sequence
  SAMD9L targeting guide sequence portion
cugugguaaauaaagaaugaca

SEQ ID NO: 6105 - RNA, 22 nt, Artificial Sequence
  SAMD9L targeting guide sequence portion
gaaugacacuuuaugacaggcc

SEQ ID NO: 6106 - RNA, 22 nt, Artificial Sequence
  SAMD9L targeting guide sequence portion
gacacuuuaugacaggcccagg

SEQ ID NO: 6107 - RNA, 22 nt, Artificial Sequence
  SAMD9L targeting guide sequence portion
gaccugugguaaauaaagaaug

SEQ ID NO: 6108 - RNA, 22 nt, Artificial Sequence
  SAMD9L targeting guide sequence portion
gcccugggccugucauaaagug

SEQ ID NO: 6109 - RNA, 22 nt, Artificial Sequence
  SAMD9L targeting guide sequence portion
gccugucauaaagugucauucu

SEQ ID NO: 6110 - RNA, 22 nt, Artificial Sequence
  SAMD9L targeting guide sequence portion
ggcccugggccugucauaaagu

SEQ ID NO: 6111 - RNA, 22 nt, Artificial Sequence
  SAMD9L targeting guide sequence portion
ggccugucauaaagugucauuc

SEQ ID NO: 6112 - RNA, 22 nt, Artificial Sequence
  SAMD9L targeting guide sequence portion
gggcccugggccugucauaaag

SEQ ID NO: 6113 - RNA, 22 nt, Artificial Sequence
  SAMD9L targeting guide sequence portion
gggccugucauaaagugucauu

SEQ ID NO: 6114 - RNA, 22 nt, Artificial Sequence
  SAMD9L targeting guide sequence portion
ggggcccugggccugucauaaa

SEQ ID NO: 6115 - RNA, 22 nt, Artificial Sequence
  SAMD9L targeting guide sequence portion
gguaaauaaagaaugacacuuu

SEQ ID NO: 6116 - RNA, 22 nt, Artificial Sequence
  SAMD9L targeting guide sequence portion
guaaauaaagaaugacacuuua

SEQ ID NO: 6117 - RNA, 22 nt, Artificial Sequence
  SAMD9L targeting guide sequence portion
gucauaaagugucauucuuuau

SEQ ID NO: 6118 - RNA, 22 nt, Artificial Sequence
  SAMD9L targeting guide sequence portion
gucauucuuuauuuaccacagg

SEQ ID NO: 6119 - RNA, 22 nt, Artificial Sequence
  SAMD9L targeting guide sequence portion
gugguaaauaaagaaugacacu

SEQ ID NO: 6120 - RNA, 22 nt, Artificial Sequence
  SAMD9L targeting guide sequence portion
gugucauucuuuauuuaccaca

SEQ ID NO: 6121 - RNA, 22 nt, Artificial Sequence
  SAMD9L targeting guide sequence portion
uaaagaaugacacuuuaugaca

SEQ ID NO: 6122 - RNA, 22 nt, Artificial Sequence
  SAMD9L targeting guide sequence portion
uaaagugucauucuuuauuuac

SEQ ID NO: 6123 - RNA, 22 nt, Artificial Sequence
  SAMD9L targeting guide sequence portion
ucauaaagugucauucuuuauu

SEQ ID NO: 6124 - RNA, 22 nt, Artificial Sequence
  SAMD9L targeting guide sequence portion
ucauucuuuauuuaccacaggu

SEQ ID NO: 6125 - RNA, 22 nt, Artificial Sequence
  SAMD9L targeting guide sequence portion
uccugaccugugguaaauaaag

SEQ ID NO: 6126 - RNA, 22 nt, Artificial Sequence
  SAMD9L targeting guide sequence portion
ugacacuuuaugacaggcccag

SEQ ID NO: 6127 - RNA, 22 nt, Artificial Sequence
  SAMD9L targeting guide sequence portion
ugaccugugguaaauaaagaau

SEQ ID NO: 6128 - RNA, 22 nt, Artificial Sequence
  SAMD9L targeting guide sequence portion
ugggccugucauaaagugucau

SEQ ID NO: 6129 - RNA, 22 nt, Artificial Sequence
  SAMD9L targeting guide sequence portion
uggggcccugggccugucauaa

SEQ ID NO: 6130 - RNA, 22 nt, Artificial Sequence
  SAMD9L targeting guide sequence portion
ugguaaauaaagaaugacacuu

SEQ ID NO: 6131 - RNA, 22 nt, Artificial Sequence
  SAMD9L targeting guide sequence portion
ugucauaaagugucauucuuua

SEQ ID NO: 6132 - RNA, 22 nt, Artificial Sequence
  SAMD9L targeting guide sequence portion
ugucauucuuuauuuaccacag

SEQ ID NO: 6133 - RNA, 22 nt, Artificial Sequence
  SAMD9L targeting guide sequence portion
ugugguaaauaaagaaugacac

SEQ ID NO: 6134 - RNA, 22 nt, Artificial Sequence
  SAMD9L targeting guide sequence portion
uuccugaccugugguaaauaaa

SEQ ID NO: 6135 - RNA, 22 nt, Artificial Sequence
  SAMD9L targeting guide sequence portion
uuggggcccugggccugucaua

SEQ ID NO: 6136 - RNA, 20 nt, Artificial Sequence
  SAMD9L targeting guide sequence portion
aaauaaagaaugucacuuua

SEQ ID NO: 6137 - RNA, 20 nt, Artificial Sequence
  SAMD9L targeting guide sequence portion
aauaaagaaugucacuuuau

SEQ ID NO: 6138 - RNA, 20 nt, Artificial Sequence
  SAMD9L targeting guide sequence portion
aaugucacuuuaugacaggc

SEQ ID NO: 6139 - RNA, 20 nt, Artificial Sequence
  SAMD9L targeting guide sequence portion
auaaagaaugucacuuuaug

SEQ ID NO: 6140 - RNA, 20 nt, Artificial Sequence
  SAMD9L targeting guide sequence portion
auaaagugacauucuuuauu

SEQ ID NO: 6141 - RNA, 20 nt, Artificial Sequence
  SAMD9L targeting guide sequence portion
augucacuuuaugacaggcc

SEQ ID NO: 6142 - RNA, 20 nt, Artificial Sequence
  SAMD9L targeting guide sequence portion
cauaaagugacauucuuuau

SEQ ID NO: 6143 - RNA, 20 nt, Artificial Sequence
  SAMD9L targeting guide sequence portion
ccugucauaaagugacauuc

SEQ ID NO: 6144 - RNA, 20 nt, Artificial Sequence
  SAMD9L targeting guide sequence portion
cugucauaaagugacauucu

SEQ ID NO: 6145 - RNA, 20 nt, Artificial Sequence
  SAMD9L targeting guide sequence portion
gccugucauaaagugacauu

SEQ ID NO: 6146 - RNA, 20 nt, Artificial Sequence
  SAMD9L targeting guide sequence portion
gguaaauaaagaaugucacu

SEQ ID NO: 6147 - RNA, 20 nt, Artificial Sequence
  SAMD9L targeting guide sequence portion
guaaauaaagaaugucacuu

SEQ ID NO: 6148 - RNA, 20 nt, Artificial Sequence
  SAMD9L targeting guide sequence portion
gucacuuuaugacaggccca

SEQ ID NO: 6149 - RNA, 20 nt, Artificial Sequence
  SAMD9L targeting guide sequence portion
gucauaaagugacauucuuu

SEQ ID NO: 6150 - RNA, 20 nt, Artificial Sequence
  SAMD9L targeting guide sequence portion
gugguaaauaaagaauguca

SEQ ID NO: 6151 - RNA, 20 nt, Artificial Sequence
  SAMD9L targeting guide sequence portion
uaaagugacauucuuuauuu

SEQ ID NO: 6152 - RNA, 20 nt, Artificial Sequence
  SAMD9L targeting guide sequence portion
uaaauaaagaaugucacuuu

SEQ ID NO: 6153 - RNA, 20 nt, Artificial Sequence
  SAMD9L targeting guide sequence portion
ucacuuuaugacaggcccag

SEQ ID NO: 6154 - RNA, 20 nt, Artificial Sequence
  SAMD9L targeting guide sequence portion
ucauaaagugacauucuuua

SEQ ID NO: 6155 - RNA, 20 nt, Artificial Sequence
  SAMD9L targeting guide sequence portion
ugguaaauaaagaaugucac

SEQ ID NO: 6156 - RNA, 20 nt, Artificial Sequence
  SAMD9L targeting guide sequence portion
ugucacuuuaugacaggccc

SEQ ID NO: 6157 - RNA, 20 nt, Artificial Sequence
  SAMD9L targeting guide sequence portion
ugucauaaagugacauucuu

SEQ ID NO: 6158 - RNA, 20 nt, Artificial Sequence
  SAMD9L targeting guide sequence portion
ugugguaaauaaagaauguc

SEQ ID NO: 6159 - RNA, 21 nt, Artificial Sequence
  SAMD9L targeting guide sequence portion
aauaaagaaugucacuuuaug

SEQ ID NO: 6160 - RNA, 21 nt, Artificial Sequence
  SAMD9L targeting guide sequence portion
aaugucacuuuaugacaggcc

SEQ ID NO: 6161 - RNA, 21 nt, Artificial Sequence
  SAMD9L targeting guide sequence portion
auaaagaaugucacuuuauga

SEQ ID NO: 6162 - RNA, 21 nt, Artificial Sequence
  SAMD9L targeting guide sequence portion
augucacuuuaugacaggccc

SEQ ID NO: 6163 - RNA, 21 nt, Artificial Sequence
  SAMD9L targeting guide sequence portion
cauaaagugacauucuuuauu

SEQ ID NO: 6164 - RNA, 21 nt, Artificial Sequence
  SAMD9L targeting guide sequence portion
ccugucauaaagugacauucu

SEQ ID NO: 6165 - RNA, 21 nt, Artificial Sequence
  SAMD9L targeting guide sequence portion
cugucauaaagugacauucuu

SEQ ID NO: 6166 - RNA, 21 nt, Artificial Sequence
  SAMD9L targeting guide sequence portion
cugugguaaauaaagaauguc

SEQ ID NO: 6167 - RNA, 21 nt, Artificial Sequence
  SAMD9L targeting guide sequence portion
gaaugucacuuuaugacaggc

SEQ ID NO: 6168 - RNA, 21 nt, Artificial Sequence
  SAMD9L targeting guide sequence portion
gccugucauaaagugacauuc

SEQ ID NO: 6169 - RNA, 21 nt, Artificial Sequence
  SAMD9L targeting guide sequence portion
ggccugucauaaagugacauu

SEQ ID NO: 6170 - RNA, 21 nt, Artificial Sequence
  SAMD9L targeting guide sequence portion
gguaaauaaagaaugucacuu

SEQ ID NO: 6171 - RNA, 21 nt, Artificial Sequence
  SAMD9L targeting guide sequence portion
guaaauaaagaaugucacuuu

SEQ ID NO: 6172 - RNA, 21 nt, Artificial Sequence
  SAMD9L targeting guide sequence portion
gucacuuuaugacaggcccag

SEQ ID NO: 6173 - RNA, 21 nt, Artificial Sequence
  SAMD9L targeting guide sequence portion
gucauaaagugacauucuuua

SEQ ID NO: 6174 - RNA, 21 nt, Artificial Sequence
  SAMD9L targeting guide sequence portion
gugguaaauaaagaaugucac

SEQ ID NO: 6175 - RNA, 21 nt, Artificial Sequence
  SAMD9L targeting guide sequence portion
ucacuuuaugacaggcccagg

SEQ ID NO: 6176 - RNA, 21 nt, Artificial Sequence
  SAMD9L targeting guide sequence portion
ucauaaagugacauucuuuau

SEQ ID NO: 6177 - RNA, 21 nt, Artificial Sequence
  SAMD9L targeting guide sequence portion
ugguaaauaaagaaugucacu

SEQ ID NO: 6178 - RNA, 21 nt, Artificial Sequence
  SAMD9L targeting guide sequence portion
ugucacuuuaugacaggccca

SEQ ID NO: 6179 - RNA, 21 nt, Artificial Sequence
  SAMD9L targeting guide sequence portion
ugucauaaagugacauucuuu

SEQ ID NO: 6180 - RNA, 21 nt, Artificial Sequence
  SAMD9L targeting guide sequence portion
ugugguaaauaaagaauguca

SEQ ID NO: 6181 - RNA, 22 nt, Artificial Sequence
  SAMD9L targeting guide sequence portion
aaauaaagaaugucacuuuaug

SEQ ID NO: 6182 - RNA, 22 nt, Artificial Sequence
  SAMD9L targeting guide sequence portion
aagaaugucacuuuaugacagg

SEQ ID NO: 6183 - RNA, 22 nt, Artificial Sequence
  SAMD9L targeting guide sequence portion
aauaaagaaugucacuuuauga

SEQ ID NO: 6184 - RNA, 22 nt, Artificial Sequence
  SAMD9L targeting guide sequence portion
aaugucacuuuaugacaggccc

SEQ ID NO: 6185 - RNA, 22 nt, Artificial Sequence
  SAMD9L targeting guide sequence portion
agaaugucacuuuaugacaggc

SEQ ID NO: 6186 - RNA, 22 nt, Artificial Sequence
  SAMD9L targeting guide sequence portion
auaaagaaugucacuuuaugac

SEQ ID NO: 6187 - RNA, 22 nt, Artificial Sequence
  SAMD9L targeting guide sequence portion
augucacuuuaugacaggccca

SEQ ID NO: 6188 - RNA, 22 nt, Artificial Sequence
  SAMD9L targeting guide sequence portion
cauaaagugacauucuuuauuu

SEQ ID NO: 6189 - RNA, 22 nt, Artificial Sequence
  SAMD9L targeting guide sequence portion
cccugggccugucauaaaguga

SEQ ID NO: 6190 - RNA, 22 nt, Artificial Sequence
  SAMD9L targeting guide sequence portion
ccugggccugucauaaagugac

SEQ ID NO: 6191 - RNA, 22 nt, Artificial Sequence
  SAMD9L targeting guide sequence portion
ccugucauaaagugacauucuu

SEQ ID NO: 6192 - RNA, 22 nt, Artificial Sequence
  SAMD9L targeting guide sequence portion
ccugugguaaauaaagaauguc

SEQ ID NO: 6193 - RNA, 22 nt, Artificial Sequence
  SAMD9L targeting guide sequence portion
cugucauaaagugacauucuuu

SEQ ID NO: 6194 - RNA, 22 nt, Artificial Sequence
  SAMD9L targeting guide sequence portion
cugugguaaauaaagaauguca

SEQ ID NO: 6195 - RNA, 22 nt, Artificial Sequence
  SAMD9L targeting guide sequence portion
gaaugucacuuuaugacaggcc

SEQ ID NO: 6196 - RNA, 22 nt, Artificial Sequence
  SAMD9L targeting guide sequence portion
gccugucauaaagugacauucu

SEQ ID NO: 6197 - RNA, 22 nt, Artificial Sequence
  SAMD9L targeting guide sequence portion
ggccugucauaaagugacauuc

SEQ ID NO: 6198 - RNA, 22 nt, Artificial Sequence
  SAMD9L targeting guide sequence portion
gggccugucauaaagugacauu

SEQ ID NO: 6199 - RNA, 22 nt, Artificial Sequence
  SAMD9L targeting guide sequence portion
gguaaauaaagaaugucacuuu

SEQ ID NO: 6200 - RNA, 22 nt, Artificial Sequence
  SAMD9L targeting guide sequence portion
guaaauaaagaaugucacuuua

SEQ ID NO: 6201 - RNA, 22 nt, Artificial Sequence
  SAMD9L targeting guide sequence portion
gucacuuuaugacaggcccagg

SEQ ID NO: 6202 - RNA, 22 nt, Artificial Sequence
  SAMD9L targeting guide sequence portion
gucauaaagugacauucuuuau

SEQ ID NO: 6203 - RNA, 22 nt, Artificial Sequence
  SAMD9L targeting guide sequence portion
gugguaaauaaagaaugucacu

SEQ ID NO: 6204 - RNA, 22 nt, Artificial Sequence
  SAMD9L targeting guide sequence portion
uaaagugacauucuuuauuuac

SEQ ID NO: 6205 - RNA, 22 nt, Artificial Sequence
  SAMD9L targeting guide sequence portion
ucacuuuaugacaggcccaggg

SEQ ID NO: 6206 - RNA, 22 nt, Artificial Sequence
  SAMD9L targeting guide sequence portion
ucauaaagugacauucuuuauu

SEQ ID NO: 6207 - RNA, 22 nt, Artificial Sequence
  SAMD9L targeting guide sequence portion
ugguaaauaaagaaugucacuu

SEQ ID NO: 6208 - RNA, 22 nt, Artificial Sequence
  SAMD9L targeting guide sequence portion
ugucacuuuaugacaggcccag

SEQ ID NO: 6209 - RNA, 22 nt, Artificial Sequence
  SAMD9L targeting guide sequence portion
ugucauaaagugacauucuuua

SEQ ID NO: 6210 - RNA, 22 nt, Artificial Sequence
  SAMD9L targeting guide sequence portion
ugugguaaauaaagaaugucac

SEQ ID NO: 6211 - RNA, 20 nt, Artificial Sequence
  SAMD9L targeting guide sequence portion
aucgcaaaaaaaaaaaaacc

SEQ ID NO: 6212 - RNA, 20 nt, Artificial Sequence
  SAMD9L targeting guide sequence portion
caucgcaaaaaaaaaaaaac

SEQ ID NO: 6213 - RNA, 20 nt, Artificial Sequence
  SAMD9L targeting guide sequence portion
ccaucgcaaaaaaaaaaaaa

SEQ ID NO: 6214 - RNA, 20 nt, Artificial Sequence
  SAMD9L targeting guide sequence portion
cgcaaaaaaaaaaaaaccca

SEQ ID NO: 6215 - RNA, 20 nt, Artificial Sequence
  SAMD9L targeting guide sequence portion
cuccaucgcaaaaaaaaaaa

SEQ ID NO: 6216 - RNA, 20 nt, Artificial Sequence
  SAMD9L targeting guide sequence portion
gcaaaaaaaaaaaaacccaa

SEQ ID NO: 6217 - RNA, 20 nt, Artificial Sequence
  SAMD9L targeting guide sequence portion
ggguuuuuuuuuuuuugcga

SEQ ID NO: 6218 - RNA, 20 nt, Artificial Sequence
  SAMD9L targeting guide sequence portion
gguuuuuuuuuuuuugcgau

SEQ ID NO: 6219 - RNA, 20 nt, Artificial Sequence
  SAMD9L targeting guide sequence portion
guuuuuggguuuuuuuuuuu

SEQ ID NO: 6220 - RNA, 20 nt, Artificial Sequence
  SAMD9L targeting guide sequence portion
guuuuuuuuuuuuugcgaug

SEQ ID NO: 6221 - RNA, 20 nt, Artificial Sequence
  SAMD9L targeting guide sequence portion
uccaucgcaaaaaaaaaaaa

SEQ ID NO: 6222 - RNA, 20 nt, Artificial Sequence
  SAMD9L targeting guide sequence portion
ucgcaaaaaaaaaaaaaccc

SEQ ID NO: 6223 - RNA, 20 nt, Artificial Sequence
  SAMD9L targeting guide sequence portion
uggguuuuuuuuuuuuugcg

SEQ ID NO: 6224 - RNA, 20 nt, Artificial Sequence
  SAMD9L targeting guide sequence portion
uuggguuuuuuuuuuuuugc

SEQ ID NO: 6225 - RNA, 20 nt, Artificial Sequence
  SAMD9L targeting guide sequence portion
uuuggguuuuuuuuuuuuug

SEQ ID NO: 6226 - RNA, 21 nt, Artificial Sequence
  SAMD9L targeting guide sequence portion
acuccaucgcaaaaaaaaaaa

SEQ ID NO: 6227 - RNA, 21 nt, Artificial Sequence
  SAMD9L targeting guide sequence portion
aucgcaaaaaaaaaaaaaccc

SEQ ID NO: 6228 - RNA, 21 nt, Artificial Sequence
  SAMD9L targeting guide sequence portion
caucgcaaaaaaaaaaaaacc

SEQ ID NO: 6229 - RNA, 21 nt, Artificial Sequence
  SAMD9L targeting guide sequence portion
ccaucgcaaaaaaaaaaaaac

SEQ ID NO: 6230 - RNA, 21 nt, Artificial Sequence
  SAMD9L targeting guide sequence portion
cgcaaaaaaaaaaaaacccaa

SEQ ID NO: 6231 - RNA, 21 nt, Artificial Sequence
  SAMD9L targeting guide sequence portion
cuccaucgcaaaaaaaaaaaa

SEQ ID NO: 6232 - RNA, 21 nt, Artificial Sequence
  SAMD9L targeting guide sequence portion
gcaaaaaaaaaaaaacccaaa

SEQ ID NO: 6233 - RNA, 21 nt, Artificial Sequence
  SAMD9L targeting guide sequence portion
ggguuuuuuuuuuuuugcgau

SEQ ID NO: 6234 - RNA, 21 nt, Artificial Sequence
  SAMD9L targeting guide sequence portion
gguuuuuuuuuuuuugcgaug

SEQ ID NO: 6235 - RNA, 21 nt, Artificial Sequence
  SAMD9L targeting guide sequence portion
guuuuuuuuuuuuugcgaugg

SEQ ID NO: 6236 - RNA, 21 nt, Artificial Sequence
  SAMD9L targeting guide sequence portion
uccaucgcaaaaaaaaaaaaa

SEQ ID NO: 6237 - RNA, 21 nt, Artificial Sequence
  SAMD9L targeting guide sequence portion
ucgcaaaaaaaaaaaaaccca

SEQ ID NO: 6238 - RNA, 21 nt, Artificial Sequence
  SAMD9L targeting guide sequence portion
uggguuuuuuuuuuuuugcga

SEQ ID NO: 6239 - RNA, 21 nt, Artificial Sequence
  SAMD9L targeting guide sequence portion
uuggguuuuuuuuuuuuugcg

SEQ ID NO: 6240 - RNA, 21 nt, Artificial Sequence
  SAMD9L targeting guide sequence portion
uuuggguuuuuuuuuuuuugc

SEQ ID NO: 6241 - RNA, 22 nt, Artificial Sequence
  SAMD9L targeting guide sequence portion
acuccaucgcaaaaaaaaaaaa

SEQ ID NO: 6242 - RNA, 22 nt, Artificial Sequence
  SAMD9L targeting guide sequence portion
aucgcaaaaaaaaaaaaaccca

SEQ ID NO: 6243 - RNA, 22 nt, Artificial Sequence
  SAMD9L targeting guide sequence portion
caucgcaaaaaaaaaaaaaccc

SEQ ID NO: 6244 - RNA, 22 nt, Artificial Sequence
  SAMD9L targeting guide sequence portion
ccaucgcaaaaaaaaaaaaacc

SEQ ID NO: 6245 - RNA, 22 nt, Artificial Sequence
  SAMD9L targeting guide sequence portion
cgcaaaaaaaaaaaaacccaaa

SEQ ID NO: 6246 - RNA, 22 nt, Artificial Sequence
  SAMD9L targeting guide sequence portion
cuccaucgcaaaaaaaaaaaaa

SEQ ID NO: 6247 - RNA, 22 nt, Artificial Sequence
  SAMD9L targeting guide sequence portion
gacuccaucgcaaaaaaaaaaa

SEQ ID NO: 6248 - RNA, 22 nt, Artificial Sequence
  SAMD9L targeting guide sequence portion
gcaaaaaaaaaaaaacccaaaa

SEQ ID NO: 6249 - RNA, 22 nt, Artificial Sequence
  SAMD9L targeting guide sequence portion
ggguuuuuuuuuuuuugcgaug

SEQ ID NO: 6250 - RNA, 22 nt, Artificial Sequence
  SAMD9L targeting guide sequence portion
gguuuuuuuuuuuuugcgaugg

SEQ ID NO: 6251 - RNA, 22 nt, Artificial Sequence
  SAMD9L targeting guide sequence portion
guuuuuuuuuuuuugcgaugga

SEQ ID NO: 6252 - RNA, 22 nt, Artificial Sequence
  SAMD9L targeting guide sequence portion
uccaucgcaaaaaaaaaaaaac

SEQ ID NO: 6253 - RNA, 22 nt, Artificial Sequence
  SAMD9L targeting guide sequence portion
ucgcaaaaaaaaaaaaacccaa

SEQ ID NO: 6254 - RNA, 22 nt, Artificial Sequence
  SAMD9L targeting guide sequence portion
uggguuuuuuuuuuuuugcgau

SEQ ID NO: 6255 - RNA, 22 nt, Artificial Sequence
  SAMD9L targeting guide sequence portion
uuggguuuuuuuuuuuuugcga

SEQ ID NO: 6256 - RNA, 22 nt, Artificial Sequence
  SAMD9L targeting guide sequence portion
uuuggguuuuuuuuuuuuugcg

SEQ ID NO: 6257 - RNA, 22 nt, Artificial Sequence
  SAMD9L targeting guide sequence portion
uuuuggguuuuuuuuuuuuugc

SEQ ID NO: 6258 - RNA, 20 nt, Artificial Sequence
  SAMD9L targeting guide sequence portion
aucgcaaaaaaaaaaaaaac

SEQ ID NO: 6259 - RNA, 20 nt, Artificial Sequence
  SAMD9L targeting guide sequence portion
caucgcaaaaaaaaaaaaaa

SEQ ID NO: 6260 - RNA, 20 nt, Artificial Sequence
  SAMD9L targeting guide sequence portion
cgcaaaaaaaaaaaaaaccc

SEQ ID NO: 6261 - RNA, 20 nt, Artificial Sequence
  SAMD9L targeting guide sequence portion
gcaaaaaaaaaaaaaaccca

SEQ ID NO: 6262 - RNA, 20 nt, Artificial Sequence
  SAMD9L targeting guide sequence portion
ggguuuuuuuuuuuuuugcg

SEQ ID NO: 6263 - RNA, 20 nt, Artificial Sequence
  SAMD9L targeting guide sequence portion
gguuuuuuuuuuuuuugcga

SEQ ID NO: 6264 - RNA, 20 nt, Artificial Sequence
  SAMD9L targeting guide sequence portion
ucgcaaaaaaaaaaaaaacc

SEQ ID NO: 6265 - RNA, 20 nt, Artificial Sequence
  SAMD9L targeting guide sequence portion
uggguuuuuuuuuuuuuugc

SEQ ID NO: 6266 - RNA, 20 nt, Artificial Sequence
  SAMD9L targeting guide sequence portion
uuggguuuuuuuuuuuuuug

SEQ ID NO: 6267 - RNA, 21 nt, Artificial Sequence
  SAMD9L targeting guide sequence portion
aucgcaaaaaaaaaaaaaacc

SEQ ID NO: 6268 - RNA, 21 nt, Artificial Sequence
  SAMD9L targeting guide sequence portion
caucgcaaaaaaaaaaaaaac

SEQ ID NO: 6269 - RNA, 21 nt, Artificial Sequence
  SAMD9L targeting guide sequence portion
ccaucgcaaaaaaaaaaaaaa

SEQ ID NO: 6270 - RNA, 21 nt, Artificial Sequence
  SAMD9L targeting guide sequence portion
cgcaaaaaaaaaaaaaaccca

SEQ ID NO: 6271 - RNA, 21 nt, Artificial Sequence
  SAMD9L targeting guide sequence portion
gcaaaaaaaaaaaaaacccaa

SEQ ID NO: 6272 - RNA, 21 nt, Artificial Sequence
  SAMD9L targeting guide sequence portion
ggguuuuuuuuuuuuuugcga

SEQ ID NO: 6273 - RNA, 21 nt, Artificial Sequence
  SAMD9L targeting guide sequence portion
gguuuuuuuuuuuuuugcgau

SEQ ID NO: 6274 - RNA, 21 nt, Artificial Sequence
  SAMD9L targeting guide sequence portion
ucgcaaaaaaaaaaaaaaccc

SEQ ID NO: 6275 - RNA, 21 nt, Artificial Sequence
  SAMD9L targeting guide sequence portion
uggguuuuuuuuuuuuuugcg

SEQ ID NO: 6276 - RNA, 21 nt, Artificial Sequence
  SAMD9L targeting guide sequence portion
uuggguuuuuuuuuuuuuugc

SEQ ID NO: 6277 - RNA, 22 nt, Artificial Sequence
  SAMD9L targeting guide sequence portion
aucgcaaaaaaaaaaaaaaccc

SEQ ID NO: 6278 - RNA, 22 nt, Artificial Sequence
  SAMD9L targeting guide sequence portion
caucgcaaaaaaaaaaaaaacc

SEQ ID NO: 6279 - RNA, 22 nt, Artificial Sequence
  SAMD9L targeting guide sequence portion
ccaucgcaaaaaaaaaaaaaac

SEQ ID NO: 6280 - RNA, 22 nt, Artificial Sequence
  SAMD9L targeting guide sequence portion
cgcaaaaaaaaaaaaaacccaa

SEQ ID NO: 6281 - RNA, 22 nt, Artificial Sequence
  SAMD9L targeting guide sequence portion
gcaaaaaaaaaaaaaacccaaa

SEQ ID NO: 6282 - RNA, 22 nt, Artificial Sequence
  SAMD9L targeting guide sequence portion
ggguuuuuuuuuuuuuugcgau

SEQ ID NO: 6283 - RNA, 22 nt, Artificial Sequence
  SAMD9L targeting guide sequence portion
gguuuuuuuuuuuuuugcgaug

SEQ ID NO: 6284 - RNA, 22 nt, Artificial Sequence
  SAMD9L targeting guide sequence portion
uccaucgcaaaaaaaaaaaaaa

SEQ ID NO: 6285 - RNA, 22 nt, Artificial Sequence
  SAMD9L targeting guide sequence portion
ucgcaaaaaaaaaaaaaaccca

SEQ ID NO: 6286 - RNA, 22 nt, Artificial Sequence
  SAMD9L targeting guide sequence portion
uggguuuuuuuuuuuuuugcga

SEQ ID NO: 6287 - RNA, 22 nt, Artificial Sequence
  SAMD9L targeting guide sequence portion
uuggguuuuuuuuuuuuuugcg

SEQ ID NO: 6288 - RNA, 22 nt, Artificial Sequence
  SAMD9L targeting guide sequence portion
uuuggguuuuuuuuuuuuuugc

SEQ ID NO: 6289 - RNA, 20 nt, Artificial Sequence
  SAMD9L targeting guide sequence portion
aaaccugccuacugauauac

SEQ ID NO: 6290 - RNA, 20 nt, Artificial Sequence
  SAMD9L targeting guide sequence portion
aaccugccuacugauauacg

SEQ ID NO: 6291 - RNA, 20 nt, Artificial Sequence
  SAMD9L targeting guide sequence portion
aagcccguauaucaguaggc

SEQ ID NO: 6292 - RNA, 20 nt, Artificial Sequence
  SAMD9L targeting guide sequence portion
acauuacucugaagcccgua

SEQ ID NO: 6293 - RNA, 20 nt, Artificial Sequence
  SAMD9L targeting guide sequence portion
accugccuacugauauacgg

SEQ ID NO: 6294 - RNA, 20 nt, Artificial Sequence
  SAMD9L targeting guide sequence portion
acgggcuucagaguaaugug

SEQ ID NO: 6295 - RNA, 20 nt, Artificial Sequence
  SAMD9L targeting guide sequence portion
acucugaagcccguauauca

SEQ ID NO: 6296 - RNA, 20 nt, Artificial Sequence
  SAMD9L targeting guide sequence portion
acugauauacgggcuucaga

SEQ ID NO: 6297 - RNA, 20 nt, Artificial Sequence
  SAMD9L targeting guide sequence portion
acuuucaaaccugccuacug

SEQ ID NO: 6298 - RNA, 20 nt, Artificial Sequence
  SAMD9L targeting guide sequence portion
agcccguauaucaguaggca

SEQ ID NO: 6299 - RNA, 20 nt, Artificial Sequence
  SAMD9L targeting guide sequence portion
aggucacauuacucugaagc

SEQ ID NO: 6300 - RNA, 20 nt, Artificial Sequence
  SAMD9L targeting guide sequence portion
auacgggcuucagaguaaug

SEQ ID NO: 6301 - RNA, 20 nt, Artificial Sequence
  SAMD9L targeting guide sequence portion
auaggucacauuacucugaa

SEQ ID NO: 6302 - RNA, 20 nt, Artificial Sequence
  SAMD9L targeting guide sequence portion
auauacgggcuucagaguaa

SEQ ID NO: 6303 - RNA, 20 nt, Artificial Sequence
  SAMD9L targeting guide sequence portion
auuacucugaagcccguaua

SEQ ID NO: 6304 - RNA, 20 nt, Artificial Sequence
  SAMD9L targeting guide sequence portion
caaaccugccuacugauaua

SEQ ID NO: 6305 - RNA, 20 nt, Artificial Sequence
  SAMD9L targeting guide sequence portion
cacauuacucugaagcccgu

SEQ ID NO: 6306 - RNA, 20 nt, Artificial Sequence
  SAMD9L targeting guide sequence portion
cauuacucugaagcccguau

SEQ ID NO: 6307 - RNA, 20 nt, Artificial Sequence
  SAMD9L targeting guide sequence portion
cccguauaucaguaggcagg

SEQ ID NO: 6308 - RNA, 20 nt, Artificial Sequence
  SAMD9L targeting guide sequence portion
ccguauaucaguaggcaggu

SEQ ID NO: 6309 - RNA, 20 nt, Artificial Sequence
  SAMD9L targeting guide sequence portion
ccuacugauauacgggcuuc

SEQ ID NO: 6310 - RNA, 20 nt, Artificial Sequence
  SAMD9L targeting guide sequence portion
ccugccuacugauauacggg

SEQ ID NO: 6311 - RNA, 20 nt, Artificial Sequence
  SAMD9L targeting guide sequence portion
cgggcuucagaguaauguga

SEQ ID NO: 6312 - RNA, 20 nt, Artificial Sequence
  SAMD9L targeting guide sequence portion
cguauaucaguaggcagguu

SEQ ID NO: 6313 - RNA, 20 nt, Artificial Sequence
  SAMD9L targeting guide sequence portion
cuacugauauacgggcuuca

SEQ ID NO: 6314 - RNA, 20 nt, Artificial Sequence
  SAMD9L targeting guide sequence portion
cucugaagcccguauaucag

SEQ ID NO: 6315 - RNA, 20 nt, Artificial Sequence
  SAMD9L targeting guide sequence portion
cugaagcccguauaucagua

SEQ ID NO: 6316 - RNA, 20 nt, Artificial Sequence
  SAMD9L targeting guide sequence portion
cugauauacgggcuucagag

SEQ ID NO: 6317 - RNA, 20 nt, Artificial Sequence
  SAMD9L targeting guide sequence portion
cugccuacugauauacgggc

SEQ ID NO: 6318 - RNA, 20 nt, Artificial Sequence
  SAMD9L targeting guide sequence portion
cuuucaaaccugccuacuga

SEQ ID NO: 6319 - RNA, 20 nt, Artificial Sequence
  SAMD9L targeting guide sequence portion
gaagcccguauaucaguagg

SEQ ID NO: 6320 - RNA, 20 nt, Artificial Sequence
  SAMD9L targeting guide sequence portion
gauauacgggcuucagagua

SEQ ID NO: 6321 - RNA, 20 nt, Artificial Sequence
  SAMD9L targeting guide sequence portion
gcccguauaucaguaggcag

SEQ ID NO: 6322 - RNA, 20 nt, Artificial Sequence
  SAMD9L targeting guide sequence portion
gccuacugauauacgggcuu

SEQ ID NO: 6323 - RNA, 20 nt, Artificial Sequence
  SAMD9L targeting guide sequence portion
ggucacauuacucugaagcc

SEQ ID NO: 6324 - RNA, 20 nt, Artificial Sequence
  SAMD9L targeting guide sequence portion
guauaucaguaggcagguuu

SEQ ID NO: 6325 - RNA, 20 nt, Artificial Sequence
  SAMD9L targeting guide sequence portion
gucacauuacucugaagccc

SEQ ID NO: 6326 - RNA, 20 nt, Artificial Sequence
  SAMD9L targeting guide sequence portion
uacgggcuucagaguaaugu

SEQ ID NO: 6327 - RNA, 20 nt, Artificial Sequence
  SAMD9L targeting guide sequence portion
uacucugaagcccguauauc

SEQ ID NO: 6328 - RNA, 20 nt, Artificial Sequence
  SAMD9L targeting guide sequence portion
uacugauauacgggcuucag

SEQ ID NO: 6329 - RNA, 20 nt, Artificial Sequence
  SAMD9L targeting guide sequence portion
uaggucacauuacucugaag

SEQ ID NO: 6330 - RNA, 20 nt, Artificial Sequence
  SAMD9L targeting guide sequence portion
uauacgggcuucagaguaau

SEQ ID NO: 6331 - RNA, 20 nt, Artificial Sequence
  SAMD9L targeting guide sequence portion
uauaggucacauuacucuga

SEQ ID NO: 6332 - RNA, 20 nt, Artificial Sequence
  SAMD9L targeting guide sequence portion
ucaaaccugccuacugauau

SEQ ID NO: 6333 - RNA, 20 nt, Artificial Sequence
  SAMD9L targeting guide sequence portion
ucacauuacucugaagcccg

SEQ ID NO: 6334 - RNA, 20 nt, Artificial Sequence
  SAMD9L targeting guide sequence portion
ucugaagcccguauaucagu

SEQ ID NO: 6335 - RNA, 20 nt, Artificial Sequence
  SAMD9L targeting guide sequence portion
ugaagcccguauaucaguag

SEQ ID NO: 6336 - RNA, 20 nt, Artificial Sequence
  SAMD9L targeting guide sequence portion
ugauauacgggcuucagagu

SEQ ID NO: 6337 - RNA, 20 nt, Artificial Sequence
  SAMD9L targeting guide sequence portion
ugccuacugauauacgggcu

SEQ ID NO: 6338 - RNA, 20 nt, Artificial Sequence
  SAMD9L targeting guide sequence portion
uuacucugaagcccguauau

SEQ ID NO: 6339 - RNA, 20 nt, Artificial Sequence
  SAMD9L targeting guide sequence portion
uucaaaccugccuacugaua

SEQ ID NO: 6340 - RNA, 20 nt, Artificial Sequence
  SAMD9L targeting guide sequence portion
uuucaaaccugccuacugau

SEQ ID NO: 6341 - RNA, 21 nt, Artificial Sequence
  SAMD9L targeting guide sequence portion
aaaccugccuacugauauacg

SEQ ID NO: 6342 - RNA, 21 nt, Artificial Sequence
  SAMD9L targeting guide sequence portion
aaccugccuacugauauacgg

SEQ ID NO: 6343 - RNA, 21 nt, Artificial Sequence
  SAMD9L targeting guide sequence portion
aagcccguauaucaguaggca

SEQ ID NO: 6344 - RNA, 21 nt, Artificial Sequence
  SAMD9L targeting guide sequence portion
acauuacucugaagcccguau

SEQ ID NO: 6345 - RNA, 21 nt, Artificial Sequence
  SAMD9L targeting guide sequence portion
accugccuacugauauacggg

SEQ ID NO: 6346 - RNA, 21 nt, Artificial Sequence
  SAMD9L targeting guide sequence portion
acgggcuucagaguaauguga

SEQ ID NO: 6347 - RNA, 21 nt, Artificial Sequence
  SAMD9L targeting guide sequence portion
acucugaagcccguauaucag

SEQ ID NO: 6348 - RNA, 21 nt, Artificial Sequence
  SAMD9L targeting guide sequence portion
acugauauacgggcuucagag

SEQ ID NO: 6349 - RNA, 21 nt, Artificial Sequence
  SAMD9L targeting guide sequence portion
acuuucaaaccugccuacuga

SEQ ID NO: 6350 - RNA, 21 nt, Artificial Sequence
  SAMD9L targeting guide sequence portion
agcccguauaucaguaggcag

SEQ ID NO: 6351 - RNA, 21 nt, Artificial Sequence
  SAMD9L targeting guide sequence portion
aggucacauuacucugaagcc

SEQ ID NO: 6352 - RNA, 21 nt, Artificial Sequence
  SAMD9L targeting guide sequence portion
auacgggcuucagaguaaugu

SEQ ID NO: 6353 - RNA, 21 nt, Artificial Sequence
  SAMD9L targeting guide sequence portion
auaggucacauuacucugaag

SEQ ID NO: 6354 - RNA, 21 nt, Artificial Sequence
  SAMD9L targeting guide sequence portion
auauacgggcuucagaguaau

SEQ ID NO: 6355 - RNA, 21 nt, Artificial Sequence
  SAMD9L targeting guide sequence portion
auauaggucacauuacucuga

SEQ ID NO: 6356 - RNA, 21 nt, Artificial Sequence
  SAMD9L targeting guide sequence portion
auuacucugaagcccguauau

SEQ ID NO: 6357 - RNA, 21 nt, Artificial Sequence
  SAMD9L targeting guide sequence portion
caaaccugccuacugauauac

SEQ ID NO: 6358 - RNA, 21 nt, Artificial Sequence
  SAMD9L targeting guide sequence portion
cacauuacucugaagcccgua

SEQ ID NO: 6359 - RNA, 21 nt, Artificial Sequence
  SAMD9L targeting guide sequence portion
cacuuucaaaccugccuacug

SEQ ID NO: 6360 - RNA, 21 nt, Artificial Sequence
  SAMD9L targeting guide sequence portion
cauuacucugaagcccguaua

SEQ ID NO: 6361 - RNA, 21 nt, Artificial Sequence
  SAMD9L targeting guide sequence portion
cccguauaucaguaggcaggu

SEQ ID NO: 6362 - RNA, 21 nt, Artificial Sequence
  SAMD9L targeting guide sequence portion
ccguauaucaguaggcagguu

SEQ ID NO: 6363 - RNA, 21 nt, Artificial Sequence
  SAMD9L targeting guide sequence portion
ccuacugauauacgggcuuca

SEQ ID NO: 6364 - RNA, 21 nt, Artificial Sequence
  SAMD9L targeting guide sequence portion
ccugccuacugauauacgggc

SEQ ID NO: 6365 - RNA, 21 nt, Artificial Sequence
  SAMD9L targeting guide sequence portion
cgggcuucagaguaaugugac

SEQ ID NO: 6366 - RNA, 21 nt, Artificial Sequence
  SAMD9L targeting guide sequence portion
cguauaucaguaggcagguuu

SEQ ID NO: 6367 - RNA, 21 nt, Artificial Sequence
  SAMD9L targeting guide sequence portion
cuacugauauacgggcuucag

SEQ ID NO: 6368 - RNA, 21 nt, Artificial Sequence
  SAMD9L targeting guide sequence portion
cucugaagcccguauaucagu

SEQ ID NO: 6369 - RNA, 21 nt, Artificial Sequence
  SAMD9L targeting guide sequence portion
cugaagcccguauaucaguag

SEQ ID NO: 6370 - RNA, 21 nt, Artificial Sequence
  SAMD9L targeting guide sequence portion
cugauauacgggcuucagagu

SEQ ID NO: 6371 - RNA, 21 nt, Artificial Sequence
  SAMD9L targeting guide sequence portion
cugccuacugauauacgggcu

SEQ ID NO: 6372 - RNA, 21 nt, Artificial Sequence
  SAMD9L targeting guide sequence portion
cuuucaaaccugccuacugau

SEQ ID NO: 6373 - RNA, 21 nt, Artificial Sequence
  SAMD9L targeting guide sequence portion
gaagcccguauaucaguaggc

SEQ ID NO: 6374 - RNA, 21 nt, Artificial Sequence
  SAMD9L targeting guide sequence portion
gauauacgggcuucagaguaa

SEQ ID NO: 6375 - RNA, 21 nt, Artificial Sequence
  SAMD9L targeting guide sequence portion
gcccguauaucaguaggcagg

SEQ ID NO: 6376 - RNA, 21 nt, Artificial Sequence
  SAMD9L targeting guide sequence portion
gccuacugauauacgggcuuc

SEQ ID NO: 6377 - RNA, 21 nt, Artificial Sequence
  SAMD9L targeting guide sequence portion
ggucacauuacucugaagccc

SEQ ID NO: 6378 - RNA, 21 nt, Artificial Sequence
  SAMD9L targeting guide sequence portion
guauaucaguaggcagguuug

SEQ ID NO: 6379 - RNA, 21 nt, Artificial Sequence
  SAMD9L targeting guide sequence portion
gucacauuacucugaagcccg

SEQ ID NO: 6380 - RNA, 21 nt, Artificial Sequence
  SAMD9L targeting guide sequence portion
uacgggcuucagaguaaugug

SEQ ID NO: 6381 - RNA, 21 nt, Artificial Sequence
  SAMD9L targeting guide sequence portion
uacucugaagcccguauauca

SEQ ID NO: 6382 - RNA, 21 nt, Artificial Sequence
  SAMD9L targeting guide sequence portion
uacugauauacgggcuucaga

SEQ ID NO: 6383 - RNA, 21 nt, Artificial Sequence
  SAMD9L targeting guide sequence portion
uaggucacauuacucugaagc

SEQ ID NO: 6384 - RNA, 21 nt, Artificial Sequence
  SAMD9L targeting guide sequence portion
uauacgggcuucagaguaaug

SEQ ID NO: 6385 - RNA, 21 nt, Artificial Sequence
  SAMD9L targeting guide sequence portion
uauaggucacauuacucugaa

SEQ ID NO: 6386 - RNA, 21 nt, Artificial Sequence
  SAMD9L targeting guide sequence portion
ucaaaccugccuacugauaua

SEQ ID NO: 6387 - RNA, 21 nt, Artificial Sequence
  SAMD9L targeting guide sequence portion
ucacauuacucugaagcccgu

SEQ ID NO: 6388 - RNA, 21 nt, Artificial Sequence
  SAMD9L targeting guide sequence portion
ucugaagcccguauaucagua

SEQ ID NO: 6389 - RNA, 21 nt, Artificial Sequence
  SAMD9L targeting guide sequence portion
ugaagcccguauaucaguagg

SEQ ID NO: 6390 - RNA, 21 nt, Artificial Sequence
  SAMD9L targeting guide sequence portion
ugauauacgggcuucagagua

SEQ ID NO: 6391 - RNA, 21 nt, Artificial Sequence
  SAMD9L targeting guide sequence portion
ugccuacugauauacgggcuu

SEQ ID NO: 6392 - RNA, 21 nt, Artificial Sequence
  SAMD9L targeting guide sequence portion
uuacucugaagcccguauauc

SEQ ID NO: 6393 - RNA, 21 nt, Artificial Sequence
  SAMD9L targeting guide sequence portion
uucaaaccugccuacugauau

SEQ ID NO: 6394 - RNA, 21 nt, Artificial Sequence
  SAMD9L targeting guide sequence portion
uuucaaaccugccuacugaua

SEQ ID NO: 6395 - RNA, 22 nt, Artificial Sequence
  SAMD9L targeting guide sequence portion
aaaccugccuacugauauacgg

SEQ ID NO: 6396 - RNA, 22 nt, Artificial Sequence
  SAMD9L targeting guide sequence portion
aaccugccuacugauauacggg

SEQ ID NO: 6397 - RNA, 22 nt, Artificial Sequence
  SAMD9L targeting guide sequence portion
aagcccguauaucaguaggcag

SEQ ID NO: 6398 - RNA, 22 nt, Artificial Sequence
  SAMD9L targeting guide sequence portion
acauuacucugaagcccguaua

SEQ ID NO: 6399 - RNA, 22 nt, Artificial Sequence
  SAMD9L targeting guide sequence portion
accugccuacugauauacgggc

SEQ ID NO: 6400 - RNA, 22 nt, Artificial Sequence
  SAMD9L targeting guide sequence portion
acgggcuucagaguaaugugac

SEQ ID NO: 6401 - RNA, 22 nt, Artificial Sequence
  SAMD9L targeting guide sequence portion
acucugaagcccguauaucagu

SEQ ID NO: 6402 - RNA, 22 nt, Artificial Sequence
  SAMD9L targeting guide sequence portion
acugauauacgggcuucagagu

SEQ ID NO: 6403 - RNA, 22 nt, Artificial Sequence
  SAMD9L targeting guide sequence portion
acuuucaaaccugccuacugau

SEQ ID NO: 6404 - RNA, 22 nt, Artificial Sequence
  SAMD9L targeting guide sequence portion
agcccguauaucaguaggcagg

SEQ ID NO: 6405 - RNA, 22 nt, Artificial Sequence
  SAMD9L targeting guide sequence portion
aggucacauuacucugaagccc

SEQ ID NO: 6406 - RNA, 22 nt, Artificial Sequence
  SAMD9L targeting guide sequence portion
auacgggcuucagaguaaugug

SEQ ID NO: 6407 - RNA, 22 nt, Artificial Sequence
  SAMD9L targeting guide sequence portion
auaggucacauuacucugaagc

SEQ ID NO: 6408 - RNA, 22 nt, Artificial Sequence
  SAMD9L targeting guide sequence portion
auauacgggcuucagaguaaug

SEQ ID NO: 6409 - RNA, 22 nt, Artificial Sequence
  SAMD9L targeting guide sequence portion
auauaggucacauuacucugaa

SEQ ID NO: 6410 - RNA, 22 nt, Artificial Sequence
  SAMD9L targeting guide sequence portion
auuacucugaagcccguauauc

SEQ ID NO: 6411 - RNA, 22 nt, Artificial Sequence
  SAMD9L targeting guide sequence portion
caaaccugccuacugauauacg

SEQ ID NO: 6412 - RNA, 22 nt, Artificial Sequence
  SAMD9L targeting guide sequence portion
cacauuacucugaagcccguau

SEQ ID NO: 6413 - RNA, 22 nt, Artificial Sequence
  SAMD9L targeting guide sequence portion
cacuuucaaaccugccuacuga

SEQ ID NO: 6414 - RNA, 22 nt, Artificial Sequence
  SAMD9L targeting guide sequence portion
cauuacucugaagcccguauau

SEQ ID NO: 6415 - RNA, 22 nt, Artificial Sequence
  SAMD9L targeting guide sequence portion
ccacuuucaaaccugccuacug

SEQ ID NO: 6416 - RNA, 22 nt, Artificial Sequence
  SAMD9L targeting guide sequence portion
cccguauaucaguaggcagguu

SEQ ID NO: 6417 - RNA, 22 nt, Artificial Sequence
  SAMD9L targeting guide sequence portion
ccguauaucaguaggcagguuu

SEQ ID NO: 6418 - RNA, 22 nt, Artificial Sequence
  SAMD9L targeting guide sequence portion
ccuacugauauacgggcuucag

SEQ ID NO: 6419 - RNA, 22 nt, Artificial Sequence
  SAMD9L targeting guide sequence portion
ccugccuacugauauacgggcu

SEQ ID NO: 6420 - RNA, 22 nt, Artificial Sequence
  SAMD9L targeting guide sequence portion
cgggcuucagaguaaugugacc

SEQ ID NO: 6421 - RNA, 22 nt, Artificial Sequence
  SAMD9L targeting guide sequence portion
cguauaucaguaggcagguuug

SEQ ID NO: 6422 - RNA, 22 nt, Artificial Sequence
  SAMD9L targeting guide sequence portion
cuacugauauacgggcuucaga

SEQ ID NO: 6423 - RNA, 22 nt, Artificial Sequence
  SAMD9L targeting guide sequence portion
cucugaagcccguauaucagua

SEQ ID NO: 6424 - RNA, 22 nt, Artificial Sequence
  SAMD9L targeting guide sequence portion
cugaagcccguauaucaguagg

SEQ ID NO: 6425 - RNA, 22 nt, Artificial Sequence
  SAMD9L targeting guide sequence portion
cugauauacgggcuucagagua

SEQ ID NO: 6426 - RNA, 22 nt, Artificial Sequence
  SAMD9L targeting guide sequence portion
cugccuacugauauacgggcuu

SEQ ID NO: 6427 - RNA, 22 nt, Artificial Sequence
  SAMD9L targeting guide sequence portion
cuuucaaaccugccuacugaua

SEQ ID NO: 6428 - RNA, 22 nt, Artificial Sequence
  SAMD9L targeting guide sequence portion
gaagcccguauaucaguaggca

SEQ ID NO: 6429 - RNA, 22 nt, Artificial Sequence
  SAMD9L targeting guide sequence portion
gauauacgggcuucagaguaau

SEQ ID NO: 6430 - RNA, 22 nt, Artificial Sequence
  SAMD9L targeting guide sequence portion
gauauaggucacauuacucuga

SEQ ID NO: 6431 - RNA, 22 nt, Artificial Sequence
  SAMD9L targeting guide sequence portion
gcccguauaucaguaggcaggu

SEQ ID NO: 6432 - RNA, 22 nt, Artificial Sequence
  SAMD9L targeting guide sequence portion
gccuacugauauacgggcuuca

SEQ ID NO: 6433 - RNA, 22 nt, Artificial Sequence
  SAMD9L targeting guide sequence portion
ggucacauuacucugaagcccg

SEQ ID NO: 6434 - RNA, 22 nt, Artificial Sequence
  SAMD9L targeting guide sequence portion
guauaucaguaggcagguuuga

SEQ ID NO: 6435 - RNA, 22 nt, Artificial Sequence
  SAMD9L targeting guide sequence portion
gucacauuacucugaagcccgu

SEQ ID NO: 6436 - RNA, 22 nt, Artificial Sequence
  SAMD9L targeting guide sequence portion
uacgggcuucagaguaauguga

SEQ ID NO: 6437 - RNA, 22 nt, Artificial Sequence
  SAMD9L targeting guide sequence portion
uacucugaagcccguauaucag

SEQ ID NO: 6438 - RNA, 22 nt, Artificial Sequence
  SAMD9L targeting guide sequence portion
uacugauauacgggcuucagag

SEQ ID NO: 6439 - RNA, 22 nt, Artificial Sequence
  SAMD9L targeting guide sequence portion
uaggucacauuacucugaagcc

SEQ ID NO: 6440 - RNA, 22 nt, Artificial Sequence
  SAMD9L targeting guide sequence portion
uauacgggcuucagaguaaugu

SEQ ID NO: 6441 - RNA, 22 nt, Artificial Sequence
  SAMD9L targeting guide sequence portion
uauaggucacauuacucugaag

SEQ ID NO: 6442 - RNA, 22 nt, Artificial Sequence
  SAMD9L targeting guide sequence portion
ucaaaccugccuacugauauac

SEQ ID NO: 6443 - RNA, 22 nt, Artificial Sequence
  SAMD9L targeting guide sequence portion
ucacauuacucugaagcccgua

SEQ ID NO: 6444 - RNA, 22 nt, Artificial Sequence
  SAMD9L targeting guide sequence portion
ucugaagcccguauaucaguag

SEQ ID NO: 6445 - RNA, 22 nt, Artificial Sequence
  SAMD9L targeting guide sequence portion
ugaagcccguauaucaguaggc

SEQ ID NO: 6446 - RNA, 22 nt, Artificial Sequence
  SAMD9L targeting guide sequence portion
ugauauacgggcuucagaguaa

SEQ ID NO: 6447 - RNA, 22 nt, Artificial Sequence
  SAMD9L targeting guide sequence portion
ugccuacugauauacgggcuuc

SEQ ID NO: 6448 - RNA, 22 nt, Artificial Sequence
  SAMD9L targeting guide sequence portion
uuacucugaagcccguauauca

SEQ ID NO: 6449 - RNA, 22 nt, Artificial Sequence
  SAMD9L targeting guide sequence portion
uucaaaccugccuacugauaua

SEQ ID NO: 6450 - RNA, 22 nt, Artificial Sequence
  SAMD9L targeting guide sequence portion
uuucaaaccugccuacugauau

SEQ ID NO: 6451 - RNA, 20 nt, Artificial Sequence
  SAMD9L targeting guide sequence portion
aaaccugccuacugauauau

SEQ ID NO: 6452 - RNA, 20 nt, Artificial Sequence
  SAMD9L targeting guide sequence portion
aaccugccuacugauauaug

SEQ ID NO: 6453 - RNA, 20 nt, Artificial Sequence
  SAMD9L targeting guide sequence portion
aagcccauauaucaguaggc

SEQ ID NO: 6454 - RNA, 20 nt, Artificial Sequence
  SAMD9L targeting guide sequence portion
acauuacucugaagcccaua

SEQ ID NO: 6455 - RNA, 20 nt, Artificial Sequence
  SAMD9L targeting guide sequence portion
accugccuacugauauaugg

SEQ ID NO: 6456 - RNA, 20 nt, Artificial Sequence
  SAMD9L targeting guide sequence portion
acucugaagcccauauauca

SEQ ID NO: 6457 - RNA, 20 nt, Artificial Sequence
  SAMD9L targeting guide sequence portion
acugauauaugggcuucaga

SEQ ID NO: 6458 - RNA, 20 nt, Artificial Sequence
  SAMD9L targeting guide sequence portion
agcccauauaucaguaggca

SEQ ID NO: 6459 - RNA, 20 nt, Artificial Sequence
  SAMD9L targeting guide sequence portion
auauaucaguaggcagguuu

SEQ ID NO: 6460 - RNA, 20 nt, Artificial Sequence
  SAMD9L targeting guide sequence portion
auauaugggcuucagaguaa

SEQ ID NO: 6461 - RNA, 20 nt, Artificial Sequence
  SAMD9L targeting guide sequence portion
auaugggcuucagaguaaug

SEQ ID NO: 6462 - RNA, 20 nt, Artificial Sequence
  SAMD9L targeting guide sequence portion
augggcuucagaguaaugug

SEQ ID NO: 6463 - RNA, 20 nt, Artificial Sequence
  SAMD9L targeting guide sequence portion
auuacucugaagcccauaua

SEQ ID NO: 6464 - RNA, 20 nt, Artificial Sequence
  SAMD9L targeting guide sequence portion
cacauuacucugaagcccau

SEQ ID NO: 6465 - RNA, 20 nt, Artificial Sequence
  SAMD9L targeting guide sequence portion
cauauaucaguaggcagguu

SEQ ID NO: 6466 - RNA, 20 nt, Artificial Sequence
  SAMD9L targeting guide sequence portion
cauuacucugaagcccauau

SEQ ID NO: 6467 - RNA, 20 nt, Artificial Sequence
  SAMD9L targeting guide sequence portion
ccauauaucaguaggcaggu

SEQ ID NO: 6468 - RNA, 20 nt, Artificial Sequence
  SAMD9L targeting guide sequence portion
cccauauaucaguaggcagg

SEQ ID NO: 6469 - RNA, 20 nt, Artificial Sequence
  SAMD9L targeting guide sequence portion
ccuacugauauaugggcuuc

SEQ ID NO: 6470 - RNA, 20 nt, Artificial Sequence
  SAMD9L targeting guide sequence portion
ccugccuacugauauauggg

SEQ ID NO: 6471 - RNA, 20 nt, Artificial Sequence
  SAMD9L targeting guide sequence portion
cuacugauauaugggcuuca

SEQ ID NO: 6472 - RNA, 20 nt, Artificial Sequence
  SAMD9L targeting guide sequence portion
cucugaagcccauauaucag

SEQ ID NO: 6473 - RNA, 20 nt, Artificial Sequence
  SAMD9L targeting guide sequence portion
cugaagcccauauaucagua

SEQ ID NO: 6474 - RNA, 20 nt, Artificial Sequence
  SAMD9L targeting guide sequence portion
cugauauaugggcuucagag

SEQ ID NO: 6475 - RNA, 20 nt, Artificial Sequence
  SAMD9L targeting guide sequence portion
cugccuacugauauaugggc

SEQ ID NO: 6476 - RNA, 20 nt, Artificial Sequence
  SAMD9L targeting guide sequence portion
gaagcccauauaucaguagg

SEQ ID NO: 6477 - RNA, 20 nt, Artificial Sequence
  SAMD9L targeting guide sequence portion
gauauaugggcuucagagua

SEQ ID NO: 6478 - RNA, 20 nt, Artificial Sequence
  SAMD9L targeting guide sequence portion
gcccauauaucaguaggcag

SEQ ID NO: 6479 - RNA, 20 nt, Artificial Sequence
  SAMD9L targeting guide sequence portion
gccuacugauauaugggcuu

SEQ ID NO: 6480 - RNA, 20 nt, Artificial Sequence
  SAMD9L targeting guide sequence portion
uacucugaagcccauauauc

SEQ ID NO: 6481 - RNA, 20 nt, Artificial Sequence
  SAMD9L targeting guide sequence portion
uacugauauaugggcuucag

SEQ ID NO: 6482 - RNA, 20 nt, Artificial Sequence
  SAMD9L targeting guide sequence portion
uauaugggcuucagaguaau

SEQ ID NO: 6483 - RNA, 20 nt, Artificial Sequence
  SAMD9L targeting guide sequence portion
uaugggcuucagaguaaugu

SEQ ID NO: 6484 - RNA, 20 nt, Artificial Sequence
  SAMD9L targeting guide sequence portion
ucacauuacucugaagccca

SEQ ID NO: 6485 - RNA, 20 nt, Artificial Sequence
  SAMD9L targeting guide sequence portion
ucugaagcccauauaucagu

SEQ ID NO: 6486 - RNA, 20 nt, Artificial Sequence
  SAMD9L targeting guide sequence portion
ugaagcccauauaucaguag

SEQ ID NO: 6487 - RNA, 20 nt, Artificial Sequence
  SAMD9L targeting guide sequence portion
ugauauaugggcuucagagu

SEQ ID NO: 6488 - RNA, 20 nt, Artificial Sequence
  SAMD9L targeting guide sequence portion
ugccuacugauauaugggcu

SEQ ID NO: 6489 - RNA, 20 nt, Artificial Sequence
  SAMD9L targeting guide sequence portion
ugggcuucagaguaauguga

SEQ ID NO: 6490 - RNA, 20 nt, Artificial Sequence
  SAMD9L targeting guide sequence portion
uuacucugaagcccauauau

SEQ ID NO: 6491 - RNA, 21 nt, Artificial Sequence
  SAMD9L targeting guide sequence portion
aaaccugccuacugauauaug

SEQ ID NO: 6492 - RNA, 21 nt, Artificial Sequence
  SAMD9L targeting guide sequence portion
aaccugccuacugauauaugg

SEQ ID NO: 6493 - RNA, 21 nt, Artificial Sequence
  SAMD9L targeting guide sequence portion
aagcccauauaucaguaggca

SEQ ID NO: 6494 - RNA, 21 nt, Artificial Sequence
  SAMD9L targeting guide sequence portion
acauuacucugaagcccauau

SEQ ID NO: 6495 - RNA, 21 nt, Artificial Sequence
  SAMD9L targeting guide sequence portion
accugccuacugauauauggg

SEQ ID NO: 6496 - RNA, 21 nt, Artificial Sequence
  SAMD9L targeting guide sequence portion
acucugaagcccauauaucag

SEQ ID NO: 6497 - RNA, 21 nt, Artificial Sequence
  SAMD9L targeting guide sequence portion
acugauauaugggcuucagag

SEQ ID NO: 6498 - RNA, 21 nt, Artificial Sequence
  SAMD9L targeting guide sequence portion
agcccauauaucaguaggcag

SEQ ID NO: 6499 - RNA, 21 nt, Artificial Sequence
  SAMD9L targeting guide sequence portion
auauaucaguaggcagguuug

SEQ ID NO: 6500 - RNA, 21 nt, Artificial Sequence
  SAMD9L targeting guide sequence portion
auauaugggcuucagaguaau

SEQ ID NO: 6501 - RNA, 21 nt, Artificial Sequence
  SAMD9L targeting guide sequence portion
auaugggcuucagaguaaugu

SEQ ID NO: 6502 - RNA, 21 nt, Artificial Sequence
  SAMD9L targeting guide sequence portion
augggcuucagaguaauguga

SEQ ID NO: 6503 - RNA, 21 nt, Artificial Sequence
  SAMD9L targeting guide sequence portion
auuacucugaagcccauauau

SEQ ID NO: 6504 - RNA, 21 nt, Artificial Sequence
  SAMD9L targeting guide sequence portion
caaaccugccuacugauauau

SEQ ID NO: 6505 - RNA, 21 nt, Artificial Sequence
  SAMD9L targeting guide sequence portion
cacauuacucugaagcccaua

SEQ ID NO: 6506 - RNA, 21 nt, Artificial Sequence
  SAMD9L targeting guide sequence portion
cauauaucaguaggcagguuu

SEQ ID NO: 6507 - RNA, 21 nt, Artificial Sequence
  SAMD9L targeting guide sequence portion
cauuacucugaagcccauaua

SEQ ID NO: 6508 - RNA, 21 nt, Artificial Sequence
  SAMD9L targeting guide sequence portion
ccauauaucaguaggcagguu

SEQ ID NO: 6509 - RNA, 21 nt, Artificial Sequence
  SAMD9L targeting guide sequence portion
cccauauaucaguaggcaggu

SEQ ID NO: 6510 - RNA, 21 nt, Artificial Sequence
  SAMD9L targeting guide sequence portion
ccuacugauauaugggcuuca

SEQ ID NO: 6511 - RNA, 21 nt, Artificial Sequence
  SAMD9L targeting guide sequence portion
ccugccuacugauauaugggc

SEQ ID NO: 6512 - RNA, 21 nt, Artificial Sequence
  SAMD9L targeting guide sequence portion
cuacugauauaugggcuucag

SEQ ID NO: 6513 - RNA, 21 nt, Artificial Sequence
  SAMD9L targeting guide sequence portion
cucugaagcccauauaucagu

SEQ ID NO: 6514 - RNA, 21 nt, Artificial Sequence
  SAMD9L targeting guide sequence portion
cugaagcccauauaucaguag

SEQ ID NO: 6515 - RNA, 21 nt, Artificial Sequence
  SAMD9L targeting guide sequence portion
cugauauaugggcuucagagu

SEQ ID NO: 6516 - RNA, 21 nt, Artificial Sequence
  SAMD9L targeting guide sequence portion
cugccuacugauauaugggcu

SEQ ID NO: 6517 - RNA, 21 nt, Artificial Sequence
  SAMD9L targeting guide sequence portion
gaagcccauauaucaguaggc

SEQ ID NO: 6518 - RNA, 21 nt, Artificial Sequence
  SAMD9L targeting guide sequence portion
gauauaugggcuucagaguaa

SEQ ID NO: 6519 - RNA, 21 nt, Artificial Sequence
  SAMD9L targeting guide sequence portion
gcccauauaucaguaggcagg

SEQ ID NO: 6520 - RNA, 21 nt, Artificial Sequence
  SAMD9L targeting guide sequence portion
gccuacugauauaugggcuuc

SEQ ID NO: 6521 - RNA, 21 nt, Artificial Sequence
  SAMD9L targeting guide sequence portion
gucacauuacucugaagccca

SEQ ID NO: 6522 - RNA, 21 nt, Artificial Sequence
  SAMD9L targeting guide sequence portion
uacucugaagcccauauauca

SEQ ID NO: 6523 - RNA, 21 nt, Artificial Sequence
  SAMD9L targeting guide sequence portion
uacugauauaugggcuucaga

SEQ ID NO: 6524 - RNA, 21 nt, Artificial Sequence
  SAMD9L targeting guide sequence portion
uauaugggcuucagaguaaug

SEQ ID NO: 6525 - RNA, 21 nt, Artificial Sequence
  SAMD9L targeting guide sequence portion
uaugggcuucagaguaaugug

SEQ ID NO: 6526 - RNA, 21 nt, Artificial Sequence
  SAMD9L targeting guide sequence portion
ucacauuacucugaagcccau

SEQ ID NO: 6527 - RNA, 21 nt, Artificial Sequence
  SAMD9L targeting guide sequence portion
ucugaagcccauauaucagua

SEQ ID NO: 6528 - RNA, 21 nt, Artificial Sequence
  SAMD9L targeting guide sequence portion
ugaagcccauauaucaguagg

SEQ ID NO: 6529 - RNA, 21 nt, Artificial Sequence
  SAMD9L targeting guide sequence portion
ugauauaugggcuucagagua

SEQ ID NO: 6530 - RNA, 21 nt, Artificial Sequence
  SAMD9L targeting guide sequence portion
ugccuacugauauaugggcuu

SEQ ID NO: 6531 - RNA, 21 nt, Artificial Sequence
  SAMD9L targeting guide sequence portion
ugggcuucagaguaaugugac

SEQ ID NO: 6532 - RNA, 21 nt, Artificial Sequence
  SAMD9L targeting guide sequence portion
uuacucugaagcccauauauc

SEQ ID NO: 6533 - RNA, 22 nt, Artificial Sequence
  SAMD9L targeting guide sequence portion
aaaccugccuacugauauaugg

SEQ ID NO: 6534 - RNA, 22 nt, Artificial Sequence
  SAMD9L targeting guide sequence portion
aaccugccuacugauauauggg

SEQ ID NO: 6535 - RNA, 22 nt, Artificial Sequence
  SAMD9L targeting guide sequence portion
aagcccauauaucaguaggcag

SEQ ID NO: 6536 - RNA, 22 nt, Artificial Sequence
  SAMD9L targeting guide sequence portion
acauuacucugaagcccauaua

SEQ ID NO: 6537 - RNA, 22 nt, Artificial Sequence
  SAMD9L targeting guide sequence portion
accugccuacugauauaugggc

SEQ ID NO: 6538 - RNA, 22 nt, Artificial Sequence
  SAMD9L targeting guide sequence portion
acucugaagcccauauaucagu

SEQ ID NO: 6539 - RNA, 22 nt, Artificial Sequence
  SAMD9L targeting guide sequence portion
acugauauaugggcuucagagu

SEQ ID NO: 6540 - RNA, 22 nt, Artificial Sequence
  SAMD9L targeting guide sequence portion
agcccauauaucaguaggcagg

SEQ ID NO: 6541 - RNA, 22 nt, Artificial Sequence
  SAMD9L targeting guide sequence portion
auauaucaguaggcagguuuga

SEQ ID NO: 6542 - RNA, 22 nt, Artificial Sequence
  SAMD9L targeting guide sequence portion
auauaugggcuucagaguaaug

SEQ ID NO: 6543 - RNA, 22 nt, Artificial Sequence
  SAMD9L targeting guide sequence portion
auaugggcuucagaguaaugug

SEQ ID NO: 6544 - RNA, 22 nt, Artificial Sequence
  SAMD9L targeting guide sequence portion
augggcuucagaguaaugugac

SEQ ID NO: 6545 - RNA, 22 nt, Artificial Sequence
  SAMD9L targeting guide sequence portion
auuacucugaagcccauauauc

SEQ ID NO: 6546 - RNA, 22 nt, Artificial Sequence
  SAMD9L targeting guide sequence portion
caaaccugccuacugauauaug

SEQ ID NO: 6547 - RNA, 22 nt, Artificial Sequence
  SAMD9L targeting guide sequence portion
cacauuacucugaagcccauau

SEQ ID NO: 6548 - RNA, 22 nt, Artificial Sequence
  SAMD9L targeting guide sequence portion
cauauaucaguaggcagguuug

SEQ ID NO: 6549 - RNA, 22 nt, Artificial Sequence
  SAMD9L targeting guide sequence portion
cauuacucugaagcccauauau

SEQ ID NO: 6550 - RNA, 22 nt, Artificial Sequence
  SAMD9L targeting guide sequence portion
ccauauaucaguaggcagguuu

SEQ ID NO: 6551 - RNA, 22 nt, Artificial Sequence
  SAMD9L targeting guide sequence portion
cccauauaucaguaggcagguu

SEQ ID NO: 6552 - RNA, 22 nt, Artificial Sequence
  SAMD9L targeting guide sequence portion
ccuacugauauaugggcuucag

SEQ ID NO: 6553 - RNA, 22 nt, Artificial Sequence
  SAMD9L targeting guide sequence portion
ccugccuacugauauaugggcu

SEQ ID NO: 6554 - RNA, 22 nt, Artificial Sequence
  SAMD9L targeting guide sequence portion
cuacugauauaugggcuucaga

SEQ ID NO: 6555 - RNA, 22 nt, Artificial Sequence
  SAMD9L targeting guide sequence portion
cucugaagcccauauaucagua

SEQ ID NO: 6556 - RNA, 22 nt, Artificial Sequence
  SAMD9L targeting guide sequence portion
cugaagcccauauaucaguagg

SEQ ID NO: 6557 - RNA, 22 nt, Artificial Sequence
  SAMD9L targeting guide sequence portion
cugauauaugggcuucagagua

SEQ ID NO: 6558 - RNA, 22 nt, Artificial Sequence
  SAMD9L targeting guide sequence portion
cugccuacugauauaugggcuu

SEQ ID NO: 6559 - RNA, 22 nt, Artificial Sequence
  SAMD9L targeting guide sequence portion
gaagcccauauaucaguaggca

SEQ ID NO: 6560 - RNA, 22 nt, Artificial Sequence
  SAMD9L targeting guide sequence portion
gauauaugggcuucagaguaau

SEQ ID NO: 6561 - RNA, 22 nt, Artificial Sequence
  SAMD9L targeting guide sequence portion
gcccauauaucaguaggcaggu

SEQ ID NO: 6562 - RNA, 22 nt, Artificial Sequence
  SAMD9L targeting guide sequence portion
gccuacugauauaugggcuuca

SEQ ID NO: 6563 - RNA, 22 nt, Artificial Sequence
  SAMD9L targeting guide sequence portion
ggucacauuacucugaagccca

SEQ ID NO: 6564 - RNA, 22 nt, Artificial Sequence
  SAMD9L targeting guide sequence portion
gucacauuacucugaagcccau

SEQ ID NO: 6565 - RNA, 22 nt, Artificial Sequence
  SAMD9L targeting guide sequence portion
uacucugaagcccauauaucag

SEQ ID NO: 6566 - RNA, 22 nt, Artificial Sequence
  SAMD9L targeting guide sequence portion
uacugauauaugggcuucagag

SEQ ID NO: 6567 - RNA, 22 nt, Artificial Sequence
  SAMD9L targeting guide sequence portion
uauaugggcuucagaguaaugu

SEQ ID NO: 6568 - RNA, 22 nt, Artificial Sequence
  SAMD9L targeting guide sequence portion
uaugggcuucagaguaauguga

SEQ ID NO: 6569 - RNA, 22 nt, Artificial Sequence
  SAMD9L targeting guide sequence portion
ucaaaccugccuacugauauau

SEQ ID NO: 6570 - RNA, 22 nt, Artificial Sequence
  SAMD9L targeting guide sequence portion
ucacauuacucugaagcccaua

SEQ ID NO: 6571 - RNA, 22 nt, Artificial Sequence
  SAMD9L targeting guide sequence portion
ucugaagcccauauaucaguag

SEQ ID NO: 6572 - RNA, 22 nt, Artificial Sequence
  SAMD9L targeting guide sequence portion
ugaagcccauauaucaguaggc

SEQ ID NO: 6573 - RNA, 22 nt, Artificial Sequence
  SAMD9L targeting guide sequence portion
ugauauaugggcuucagaguaa

SEQ ID NO: 6574 - RNA, 22 nt, Artificial Sequence
  SAMD9L targeting guide sequence portion
ugccuacugauauaugggcuuc

SEQ ID NO: 6575 - RNA, 22 nt, Artificial Sequence
  SAMD9L targeting guide sequence portion
ugggcuucagaguaaugugacc

SEQ ID NO: 6576 - RNA, 22 nt, Artificial Sequence
  SAMD9L targeting guide sequence portion
uuacucugaagcccauauauca

SEQ ID NO: 6577 - RNA, 20 nt, Artificial Sequence
  SAMD9L targeting guide sequence portion
aaaaucuucggagaaagcau

SEQ ID NO: 6578 - RNA, 20 nt, Artificial Sequence
  SAMD9L targeting guide sequence portion
aaaaugcuuucuccgaagau

SEQ ID NO: 6579 - RNA, 20 nt, Artificial Sequence
  SAMD9L targeting guide sequence portion
aaaucuucggagaaagcauu

SEQ ID NO: 6580 - RNA, 20 nt, Artificial Sequence
  SAMD9L targeting guide sequence portion
aaaugcuuucuccgaagauu

SEQ ID NO: 6581 - RNA, 20 nt, Artificial Sequence
  SAMD9L targeting guide sequence portion
aaucuucggagaaagcauuu

SEQ ID NO: 6582 - RNA, 20 nt, Artificial Sequence
  SAMD9L targeting guide sequence portion
aaugcuuucuccgaagauuu

SEQ ID NO: 6583 - RNA, 20 nt, Artificial Sequence
  SAMD9L targeting guide sequence portion
aucuucggagaaagcauuuu

SEQ ID NO: 6584 - RNA, 20 nt, Artificial Sequence
  SAMD9L targeting guide sequence portion
aucuuuuuuaaaaucuucgg

SEQ ID NO: 6585 - RNA, 20 nt, Artificial Sequence
  SAMD9L targeting guide sequence portion
augcuuucuccgaagauuuu

SEQ ID NO: 6586 - RNA, 20 nt, Artificial Sequence
  SAMD9L targeting guide sequence portion
cccccuuaucuuuuuuaaaa

SEQ ID NO: 6587 - RNA, 20 nt, Artificial Sequence
  SAMD9L targeting guide sequence portion
ccccuuaucuuuuuuaaaau

SEQ ID NO: 6588 - RNA, 20 nt, Artificial Sequence
  SAMD9L targeting guide sequence portion
cccuuaucuuuuuuaaaauc

SEQ ID NO: 6589 - RNA, 20 nt, Artificial Sequence
  SAMD9L targeting guide sequence portion
ccgaagauuuuaaaaaagau

SEQ ID NO: 6590 - RNA, 20 nt, Artificial Sequence
  SAMD9L targeting guide sequence portion
ccuuaucuuuuuuaaaaucu

SEQ ID NO: 6591 - RNA, 20 nt, Artificial Sequence
  SAMD9L targeting guide sequence portion
cgaagauuuuaaaaaagaua

SEQ ID NO: 6592 - RNA, 20 nt, Artificial Sequence
  SAMD9L targeting guide sequence portion
cuaaaaugcuuucuccgaag

SEQ ID NO: 6593 - RNA, 20 nt, Artificial Sequence
  SAMD9L targeting guide sequence portion
cuccgaagauuuuaaaaaag

SEQ ID NO: 6594 - RNA, 20 nt, Artificial Sequence
  SAMD9L targeting guide sequence portion
cuucggagaaagcauuuuag

SEQ ID NO: 6595 - RNA, 20 nt, Artificial Sequence
  SAMD9L targeting guide sequence portion
cuucuaaaaugcuuucuccg

SEQ ID NO: 6596 - RNA, 20 nt, Artificial Sequence
  SAMD9L targeting guide sequence portion
cuuucuccgaagauuuuaaa

SEQ ID NO: 6597 - RNA, 20 nt, Artificial Sequence
  SAMD9L targeting guide sequence portion
cuuuuuuaaaaucuucggag

SEQ ID NO: 6598 - RNA, 20 nt, Artificial Sequence
  SAMD9L targeting guide sequence portion
gcuuucuccgaagauuuuaa

SEQ ID NO: 6599 - RNA, 20 nt, Artificial Sequence
  SAMD9L targeting guide sequence portion
uaaaaucuucggagaaagca

SEQ ID NO: 6600 - RNA, 20 nt, Artificial Sequence
  SAMD9L targeting guide sequence portion
uaaaaugcuuucuccgaaga

SEQ ID NO: 6601 - RNA, 20 nt, Artificial Sequence
  SAMD9L targeting guide sequence portion
uaucuuuuuuaaaaucuucg

SEQ ID NO: 6602 - RNA, 20 nt, Artificial Sequence
  SAMD9L targeting guide sequence portion
uccgaagauuuuaaaaaaga

SEQ ID NO: 6603 - RNA, 20 nt, Artificial Sequence
  SAMD9L targeting guide sequence portion
ucuaaaaugcuuucuccgaa

SEQ ID NO: 6604 - RNA, 20 nt, Artificial Sequence
  SAMD9L targeting guide sequence portion
ucuccgaagauuuuaaaaaa

SEQ ID NO: 6605 - RNA, 20 nt, Artificial Sequence
  SAMD9L targeting guide sequence portion
ucuucggagaaagcauuuua

SEQ ID NO: 6606 - RNA, 20 nt, Artificial Sequence
  SAMD9L targeting guide sequence portion
ucuucuaaaaugcuuucucc

SEQ ID NO: 6607 - RNA, 20 nt, Artificial Sequence
  SAMD9L targeting guide sequence portion
ucuuuuuuaaaaucuucgga

SEQ ID NO: 6608 - RNA, 20 nt, Artificial Sequence
  SAMD9L targeting guide sequence portion
ugcuuucuccgaagauuuua

SEQ ID NO: 6609 - RNA, 20 nt, Artificial Sequence
  SAMD9L targeting guide sequence portion
uuaaaaucuucggagaaagc

SEQ ID NO: 6610 - RNA, 20 nt, Artificial Sequence
  SAMD9L targeting guide sequence portion
uucuaaaaugcuuucuccga

SEQ ID NO: 6611 - RNA, 20 nt, Artificial Sequence
  SAMD9L targeting guide sequence portion
uucuccgaagauuuuaaaaa

SEQ ID NO: 6612 - RNA, 20 nt, Artificial Sequence
  SAMD9L targeting guide sequence portion
uucuucuaaaaugcuuucuc

SEQ ID NO: 6613 - RNA, 20 nt, Artificial Sequence
  SAMD9L targeting guide sequence portion
uuuaaaaucuucggagaaag

SEQ ID NO: 6614 - RNA, 20 nt, Artificial Sequence
  SAMD9L targeting guide sequence portion
uuucuccgaagauuuuaaaa

SEQ ID NO: 6615 - RNA, 20 nt, Artificial Sequence
  SAMD9L targeting guide sequence portion
uuucuucuaaaaugcuuucu

SEQ ID NO: 6616 - RNA, 20 nt, Artificial Sequence
  SAMD9L targeting guide sequence portion
uuuuaaaaucuucggagaaa

SEQ ID NO: 6617 - RNA, 20 nt, Artificial Sequence
  SAMD9L targeting guide sequence portion
uuuuuaaaaucuucggagaa

SEQ ID NO: 6618 - RNA, 20 nt, Artificial Sequence
  SAMD9L targeting guide sequence portion
uuuuuuaaaaucuucggaga

SEQ ID NO: 6619 - RNA, 21 nt, Artificial Sequence
  SAMD9L targeting guide sequence portion
aaaaucuucggagaaagcauu

SEQ ID NO: 6620 - RNA, 21 nt, Artificial Sequence
  SAMD9L targeting guide sequence portion
aaaaugcuuucuccgaagauu

SEQ ID NO: 6621 - RNA, 21 nt, Artificial Sequence
  SAMD9L targeting guide sequence portion
aaaucuucggagaaagcauuu

SEQ ID NO: 6622 - RNA, 21 nt, Artificial Sequence
  SAMD9L targeting guide sequence portion
aaaugcuuucuccgaagauuu

SEQ ID NO: 6623 - RNA, 21 nt, Artificial Sequence
  SAMD9L targeting guide sequence portion
aaucuucggagaaagcauuuu

SEQ ID NO: 6624 - RNA, 21 nt, Artificial Sequence
  SAMD9L targeting guide sequence portion
aaugcuuucuccgaagauuuu

SEQ ID NO: 6625 - RNA, 21 nt, Artificial Sequence
  SAMD9L targeting guide sequence portion
aucuucggagaaagcauuuua

SEQ ID NO: 6626 - RNA, 21 nt, Artificial Sequence
  SAMD9L targeting guide sequence portion
aucuuuuuuaaaaucuucgga

SEQ ID NO: 6627 - RNA, 21 nt, Artificial Sequence
  SAMD9L targeting guide sequence portion
augcuuucuccgaagauuuua

SEQ ID NO: 6628 - RNA, 21 nt, Artificial Sequence
  SAMD9L targeting guide sequence portion
ccccccuuaucuuuuuuaaaa

SEQ ID NO: 6629 - RNA, 21 nt, Artificial Sequence
  SAMD9L targeting guide sequence portion
cccccuuaucuuuuuuaaaau

SEQ ID NO: 6630 - RNA, 21 nt, Artificial Sequence
  SAMD9L targeting guide sequence portion
ccccuuaucuuuuuuaaaauc

SEQ ID NO: 6631 - RNA, 21 nt, Artificial Sequence
  SAMD9L targeting guide sequence portion
cccuuaucuuuuuuaaaaucu

SEQ ID NO: 6632 - RNA, 21 nt, Artificial Sequence
  SAMD9L targeting guide sequence portion
ccgaagauuuuaaaaaagaua

SEQ ID NO: 6633 - RNA, 21 nt, Artificial Sequence
  SAMD9L targeting guide sequence portion
cuaaaaugcuuucuccgaaga

SEQ ID NO: 6634 - RNA, 21 nt, Artificial Sequence
  SAMD9L targeting guide sequence portion
cuccgaagauuuuaaaaaaga

SEQ ID NO: 6635 - RNA, 21 nt, Artificial Sequence
  SAMD9L targeting guide sequence portion
cuucggagaaagcauuuuaga

SEQ ID NO: 6636 - RNA, 21 nt, Artificial Sequence
  SAMD9L targeting guide sequence portion
cuucuaaaaugcuuucuccga

SEQ ID NO: 6637 - RNA, 21 nt, Artificial Sequence
  SAMD9L targeting guide sequence portion
cuuucuccgaagauuuuaaaa

SEQ ID NO: 6638 - RNA, 21 nt, Artificial Sequence
  SAMD9L targeting guide sequence portion
cuuuuuuaaaaucuucggaga

SEQ ID NO: 6639 - RNA, 21 nt, Artificial Sequence
  SAMD9L targeting guide sequence portion
gcuuucuccgaagauuuuaaa

SEQ ID NO: 6640 - RNA, 21 nt, Artificial Sequence
  SAMD9L targeting guide sequence portion
uaaaaucuucggagaaagcau

SEQ ID NO: 6641 - RNA, 21 nt, Artificial Sequence
  SAMD9L targeting guide sequence portion
uaaaaugcuuucuccgaagau

SEQ ID NO: 6642 - RNA, 21 nt, Artificial Sequence
  SAMD9L targeting guide sequence portion
uaucuuuuuuaaaaucuucgg

SEQ ID NO: 6643 - RNA, 21 nt, Artificial Sequence
  SAMD9L targeting guide sequence portion
uccgaagauuuuaaaaaagau

SEQ ID NO: 6644 - RNA, 21 nt, Artificial Sequence
  SAMD9L targeting guide sequence portion
ucuaaaaugcuuucuccgaag

SEQ ID NO: 6645 - RNA, 21 nt, Artificial Sequence
  SAMD9L targeting guide sequence portion
ucuccgaagauuuuaaaaaag

SEQ ID NO: 6646 - RNA, 21 nt, Artificial Sequence
  SAMD9L targeting guide sequence portion
ucuucggagaaagcauuuuag

SEQ ID NO: 6647 - RNA, 21 nt, Artificial Sequence
  SAMD9L targeting guide sequence portion
ucuucuaaaaugcuuucuccg

SEQ ID NO: 6648 - RNA, 21 nt, Artificial Sequence
  SAMD9L targeting guide sequence portion
ucuuuuuuaaaaucuucggag

SEQ ID NO: 6649 - RNA, 21 nt, Artificial Sequence
  SAMD9L targeting guide sequence portion
ugcuuucuccgaagauuuuaa

SEQ ID NO: 6650 - RNA, 21 nt, Artificial Sequence
  SAMD9L targeting guide sequence portion
uuaaaaucuucggagaaagca

SEQ ID NO: 6651 - RNA, 21 nt, Artificial Sequence
  SAMD9L targeting guide sequence portion
uucuaaaaugcuuucuccgaa

SEQ ID NO: 6652 - RNA, 21 nt, Artificial Sequence
  SAMD9L targeting guide sequence portion
uucuccgaagauuuuaaaaaa

SEQ ID NO: 6653 - RNA, 21 nt, Artificial Sequence
  SAMD9L targeting guide sequence portion
uucuucuaaaaugcuuucucc

SEQ ID NO: 6654 - RNA, 21 nt, Artificial Sequence
  SAMD9L targeting guide sequence portion
uuuaaaaucuucggagaaagc

SEQ ID NO: 6655 - RNA, 21 nt, Artificial Sequence
  SAMD9L targeting guide sequence portion
uuucuccgaagauuuuaaaaa

SEQ ID NO: 6656 - RNA, 21 nt, Artificial Sequence
  SAMD9L targeting guide sequence portion
uuucuucuaaaaugcuuucuc

SEQ ID NO: 6657 - RNA, 21 nt, Artificial Sequence
  SAMD9L targeting guide sequence portion
uuuuaaaaucuucggagaaag

SEQ ID NO: 6658 - RNA, 21 nt, Artificial Sequence
  SAMD9L targeting guide sequence portion
uuuucuucuaaaaugcuuucu

SEQ ID NO: 6659 - RNA, 21 nt, Artificial Sequence
  SAMD9L targeting guide sequence portion
uuuuuaaaaucuucggagaaa

SEQ ID NO: 6660 - RNA, 21 nt, Artificial Sequence
  SAMD9L targeting guide sequence portion
uuuuuuaaaaucuucggagaa

SEQ ID NO: 6661 - RNA, 22 nt, Artificial Sequence
  SAMD9L targeting guide sequence portion
aaaaucuucggagaaagcauuu

SEQ ID NO: 6662 - RNA, 22 nt, Artificial Sequence
  SAMD9L targeting guide sequence portion
aaaaugcuuucuccgaagauuu

SEQ ID NO: 6663 - RNA, 22 nt, Artificial Sequence
  SAMD9L targeting guide sequence portion
aaaucuucggagaaagcauuuu

SEQ ID NO: 6664 - RNA, 22 nt, Artificial Sequence
  SAMD9L targeting guide sequence portion
aaaugcuuucuccgaagauuuu

SEQ ID NO: 6665 - RNA, 22 nt, Artificial Sequence
  SAMD9L targeting guide sequence portion
aaucuucggagaaagcauuuua

SEQ ID NO: 6666 - RNA, 22 nt, Artificial Sequence
  SAMD9L targeting guide sequence portion
aaugcuuucuccgaagauuuua

SEQ ID NO: 6667 - RNA, 22 nt, Artificial Sequence
  SAMD9L targeting guide sequence portion
aucuucggagaaagcauuuuag

SEQ ID NO: 6668 - RNA, 22 nt, Artificial Sequence
  SAMD9L targeting guide sequence portion
aucuuuuuuaaaaucuucggag

SEQ ID NO: 6669 - RNA, 22 nt, Artificial Sequence
  SAMD9L targeting guide sequence portion
augcuuucuccgaagauuuuaa

SEQ ID NO: 6670 - RNA, 22 nt, Artificial Sequence
  SAMD9L targeting guide sequence portion
auuuucuucuaaaaugcuuucu

SEQ ID NO: 6671 - RNA, 22 nt, Artificial Sequence
  SAMD9L targeting guide sequence portion
ccccccuuaucuuuuuuaaaau

SEQ ID NO: 6672 - RNA, 22 nt, Artificial Sequence
  SAMD9L targeting guide sequence portion
cccccuuaucuuuuuuaaaauc

SEQ ID NO: 6673 - RNA, 22 nt, Artificial Sequence
  SAMD9L targeting guide sequence portion
ccccuuaucuuuuuuaaaaucu

SEQ ID NO: 6674 - RNA, 22 nt, Artificial Sequence
  SAMD9L targeting guide sequence portion
cccuuaucuuuuuuaaaaucuu

SEQ ID NO: 6675 - RNA, 22 nt, Artificial Sequence
  SAMD9L targeting guide sequence portion
ccgaagauuuuaaaaaagauaa

SEQ ID NO: 6676 - RNA, 22 nt, Artificial Sequence
  SAMD9L targeting guide sequence portion
ccuuaucuuuuuuaaaaucuuc

SEQ ID NO: 6677 - RNA, 22 nt, Artificial Sequence
  SAMD9L targeting guide sequence portion
cgaagauuuuaaaaaagauaag

SEQ ID NO: 6678 - RNA, 22 nt, Artificial Sequence
  SAMD9L targeting guide sequence portion
cuaaaaugcuuucuccgaagau

SEQ ID NO: 6679 - RNA, 22 nt, Artificial Sequence
  SAMD9L targeting guide sequence portion
cuccgaagauuuuaaaaaagau

SEQ ID NO: 6680 - RNA, 22 nt, Artificial Sequence
  SAMD9L targeting guide sequence portion
cuuaucuuuuuuaaaaucuucg

SEQ ID NO: 6681 - RNA, 22 nt, Artificial Sequence
  SAMD9L targeting guide sequence portion
cuucggagaaagcauuuuagaa

SEQ ID NO: 6682 - RNA, 22 nt, Artificial Sequence
  SAMD9L targeting guide sequence portion
cuucuaaaaugcuuucuccgaa

SEQ ID NO: 6683 - RNA, 22 nt, Artificial Sequence
  SAMD9L targeting guide sequence portion
cuuucuccgaagauuuuaaaaa

SEQ ID NO: 6684 - RNA, 22 nt, Artificial Sequence
  SAMD9L targeting guide sequence portion
cuuuuuuaaaaucuucggagaa

SEQ ID NO: 6685 - RNA, 22 nt, Artificial Sequence
  SAMD9L targeting guide sequence portion
gcuuucuccgaagauuuuaaaa

SEQ ID NO: 6686 - RNA, 22 nt, Artificial Sequence
  SAMD9L targeting guide sequence portion
uaaaaucuucggagaaagcauu

SEQ ID NO: 6687 - RNA, 22 nt, Artificial Sequence
  SAMD9L targeting guide sequence portion
uaaaaugcuuucuccgaagauu

SEQ ID NO: 6688 - RNA, 22 nt, Artificial Sequence
  SAMD9L targeting guide sequence portion
uaucuuuuuuaaaaucuucgga

SEQ ID NO: 6689 - RNA, 22 nt, Artificial Sequence
  SAMD9L targeting guide sequence portion
uccccccuuaucuuuuuuaaaa

SEQ ID NO: 6690 - RNA, 22 nt, Artificial Sequence
  SAMD9L targeting guide sequence portion
uccgaagauuuuaaaaaagaua

SEQ ID NO: 6691 - RNA, 22 nt, Artificial Sequence
  SAMD9L targeting guide sequence portion
ucuaaaaugcuuucuccgaaga

SEQ ID NO: 6692 - RNA, 22 nt, Artificial Sequence
  SAMD9L targeting guide sequence portion
ucuccgaagauuuuaaaaaaga

SEQ ID NO: 6693 - RNA, 22 nt, Artificial Sequence
  SAMD9L targeting guide sequence portion
ucuucggagaaagcauuuuaga

SEQ ID NO: 6694 - RNA, 22 nt, Artificial Sequence
  SAMD9L targeting guide sequence portion
ucuucuaaaaugcuuucuccga

SEQ ID NO: 6695 - RNA, 22 nt, Artificial Sequence
  SAMD9L targeting guide sequence portion
ucuuuuuuaaaaucuucggaga

SEQ ID NO: 6696 - RNA, 22 nt, Artificial Sequence
  SAMD9L targeting guide sequence portion
ugcuuucuccgaagauuuuaaa

SEQ ID NO: 6697 - RNA, 22 nt, Artificial Sequence
  SAMD9L targeting guide sequence portion
uuaaaaucuucggagaaagcau

SEQ ID NO: 6698 - RNA, 22 nt, Artificial Sequence
  SAMD9L targeting guide sequence portion
uuaucuuuuuuaaaaucuucgg

SEQ ID NO: 6699 - RNA, 22 nt, Artificial Sequence
  SAMD9L targeting guide sequence portion
uucuaaaaugcuuucuccgaag

SEQ ID NO: 6700 - RNA, 22 nt, Artificial Sequence
  SAMD9L targeting guide sequence portion
uucuccgaagauuuuaaaaaag

SEQ ID NO: 6701 - RNA, 22 nt, Artificial Sequence
  SAMD9L targeting guide sequence portion
uucuucuaaaaugcuuucuccg

SEQ ID NO: 6702 - RNA, 22 nt, Artificial Sequence
  SAMD9L targeting guide sequence portion
uuuaaaaucuucggagaaagca

SEQ ID NO: 6703 - RNA, 22 nt, Artificial Sequence
  SAMD9L targeting guide sequence portion
uuucuccgaagauuuuaaaaaa

SEQ ID NO: 6704 - RNA, 22 nt, Artificial Sequence
  SAMD9L targeting guide sequence portion
uuucuucuaaaaugcuuucucc

SEQ ID NO: 6705 - RNA, 22 nt, Artificial Sequence
  SAMD9L targeting guide sequence portion
uuuuaaaaucuucggagaaagc

SEQ ID NO: 6706 - RNA, 22 nt, Artificial Sequence
  SAMD9L targeting guide sequence portion
uuuucuucuaaaaugcuuucuc

SEQ ID NO: 6707 - RNA, 22 nt, Artificial Sequence
  SAMD9L targeting guide sequence portion
uuuuuaaaaucuucggagaaag

SEQ ID NO: 6708 - RNA, 22 nt, Artificial Sequence
  SAMD9L targeting guide sequence portion
uuuuuuaaaaucuucggagaaa

SEQ ID NO: 6709 - RNA, 20 nt, Artificial Sequence
  SAMD9L targeting guide sequence portion
aaaaucuucagagaaagcau

SEQ ID NO: 6710 - RNA, 20 nt, Artificial Sequence
  SAMD9L targeting guide sequence portion
aaaaugcuuucucugaagau

SEQ ID NO: 6711 - RNA, 20 nt, Artificial Sequence
  SAMD9L targeting guide sequence portion
aaaucuucagagaaagcauu

SEQ ID NO: 6712 - RNA, 20 nt, Artificial Sequence
  SAMD9L targeting guide sequence portion
aaaugcuuucucugaagauu

SEQ ID NO: 6713 - RNA, 20 nt, Artificial Sequence
  SAMD9L targeting guide sequence portion
aaucuucagagaaagcauuu

SEQ ID NO: 6714 - RNA, 20 nt, Artificial Sequence
  SAMD9L targeting guide sequence portion
aaugcuuucucugaagauuu

SEQ ID NO: 6715 - RNA, 20 nt, Artificial Sequence
  SAMD9L targeting guide sequence portion
aucuucagagaaagcauuuu

SEQ ID NO: 6716 - RNA, 20 nt, Artificial Sequence
  SAMD9L targeting guide sequence portion
aucuuuuuuaaaaucuucag

SEQ ID NO: 6717 - RNA, 20 nt, Artificial Sequence
  SAMD9L targeting guide sequence portion
augcuuucucugaagauuuu

SEQ ID NO: 6718 - RNA, 20 nt, Artificial Sequence
  SAMD9L targeting guide sequence portion
cuaaaaugcuuucucugaag

SEQ ID NO: 6719 - RNA, 20 nt, Artificial Sequence
  SAMD9L targeting guide sequence portion
cucugaagauuuuaaaaaag

SEQ ID NO: 6720 - RNA, 20 nt, Artificial Sequence
  SAMD9L targeting guide sequence portion
cugaagauuuuaaaaaagau

SEQ ID NO: 6721 - RNA, 20 nt, Artificial Sequence
  SAMD9L targeting guide sequence portion
cuucuaaaaugcuuucucug

SEQ ID NO: 6722 - RNA, 20 nt, Artificial Sequence
  SAMD9L targeting guide sequence portion
cuuucucugaagauuuuaaa

SEQ ID NO: 6723 - RNA, 20 nt, Artificial Sequence
  SAMD9L targeting guide sequence portion
cuuuuuuaaaaucuucagag

SEQ ID NO: 6724 - RNA, 20 nt, Artificial Sequence
  SAMD9L targeting guide sequence portion
gcuuucucugaagauuuuaa

SEQ ID NO: 6725 - RNA, 20 nt, Artificial Sequence
  SAMD9L targeting guide sequence portion
uaaaaucuucagagaaagca

SEQ ID NO: 6726 - RNA, 20 nt, Artificial Sequence
  SAMD9L targeting guide sequence portion
uaaaaugcuuucucugaaga

SEQ ID NO: 6727 - RNA, 20 nt, Artificial Sequence
  SAMD9L targeting guide sequence portion
ucuaaaaugcuuucucugaa

SEQ ID NO: 6728 - RNA, 20 nt, Artificial Sequence
  SAMD9L targeting guide sequence portion
ucucugaagauuuuaaaaaa

SEQ ID NO: 6729 - RNA, 20 nt, Artificial Sequence
  SAMD9L targeting guide sequence portion
ucugaagauuuuaaaaaaga

SEQ ID NO: 6730 - RNA, 20 nt, Artificial Sequence
  SAMD9L targeting guide sequence portion
ucuucagagaaagcauuuua

SEQ ID NO: 6731 - RNA, 20 nt, Artificial Sequence
  SAMD9L targeting guide sequence portion
ucuucuaaaaugcuuucucu

SEQ ID NO: 6732 - RNA, 20 nt, Artificial Sequence
  SAMD9L targeting guide sequence portion
ucuuuuuuaaaaucuucaga

SEQ ID NO: 6733 - RNA, 20 nt, Artificial Sequence
  SAMD9L targeting guide sequence portion
ugcuuucucugaagauuuua

SEQ ID NO: 6734 - RNA, 20 nt, Artificial Sequence
  SAMD9L targeting guide sequence portion
uuaaaaucuucagagaaagc

SEQ ID NO: 6735 - RNA, 20 nt, Artificial Sequence
  SAMD9L targeting guide sequence portion
uucuaaaaugcuuucucuga

SEQ ID NO: 6736 - RNA, 20 nt, Artificial Sequence
  SAMD9L targeting guide sequence portion
uucucugaagauuuuaaaaa

SEQ ID NO: 6737 - RNA, 20 nt, Artificial Sequence
  SAMD9L targeting guide sequence portion
uuuaaaaucuucagagaaag

SEQ ID NO: 6738 - RNA, 20 nt, Artificial Sequence
  SAMD9L targeting guide sequence portion
uuucucugaagauuuuaaaa

SEQ ID NO: 6739 - RNA, 20 nt, Artificial Sequence
  SAMD9L targeting guide sequence portion
uuuuaaaaucuucagagaaa

SEQ ID NO: 6740 - RNA, 20 nt, Artificial Sequence
  SAMD9L targeting guide sequence portion
uuuuuaaaaucuucagagaa

SEQ ID NO: 6741 - RNA, 20 nt, Artificial Sequence
  SAMD9L targeting guide sequence portion
uuuuuuaaaaucuucagaga

SEQ ID NO: 6742 - RNA, 21 nt, Artificial Sequence
  SAMD9L targeting guide sequence portion
aaaaucuucagagaaagcauu

SEQ ID NO: 6743 - RNA, 21 nt, Artificial Sequence
  SAMD9L targeting guide sequence portion
aaaaugcuuucucugaagauu

SEQ ID NO: 6744 - RNA, 21 nt, Artificial Sequence
  SAMD9L targeting guide sequence portion
aaaucuucagagaaagcauuu

SEQ ID NO: 6745 - RNA, 21 nt, Artificial Sequence
  SAMD9L targeting guide sequence portion
aaaugcuuucucugaagauuu

SEQ ID NO: 6746 - RNA, 21 nt, Artificial Sequence
  SAMD9L targeting guide sequence portion
aaucuucagagaaagcauuuu

SEQ ID NO: 6747 - RNA, 21 nt, Artificial Sequence
  SAMD9L targeting guide sequence portion
aaugcuuucucugaagauuuu

SEQ ID NO: 6748 - RNA, 21 nt, Artificial Sequence
  SAMD9L targeting guide sequence portion
aucuucagagaaagcauuuua

SEQ ID NO: 6749 - RNA, 21 nt, Artificial Sequence
  SAMD9L targeting guide sequence portion
augcuuucucugaagauuuua

SEQ ID NO: 6750 - RNA, 21 nt, Artificial Sequence
  SAMD9L targeting guide sequence portion
cuaaaaugcuuucucugaaga

SEQ ID NO: 6751 - RNA, 21 nt, Artificial Sequence
  SAMD9L targeting guide sequence portion
cucugaagauuuuaaaaaaga

SEQ ID NO: 6752 - RNA, 21 nt, Artificial Sequence
  SAMD9L targeting guide sequence portion
cuucuaaaaugcuuucucuga

SEQ ID NO: 6753 - RNA, 21 nt, Artificial Sequence
  SAMD9L targeting guide sequence portion
cuuucucugaagauuuuaaaa

SEQ ID NO: 6754 - RNA, 21 nt, Artificial Sequence
  SAMD9L targeting guide sequence portion
cuuuuuuaaaaucuucagaga

SEQ ID NO: 6755 - RNA, 21 nt, Artificial Sequence
  SAMD9L targeting guide sequence portion
gcuuucucugaagauuuuaaa

SEQ ID NO: 6756 - RNA, 21 nt, Artificial Sequence
  SAMD9L targeting guide sequence portion
uaaaaucuucagagaaagcau

SEQ ID NO: 6757 - RNA, 21 nt, Artificial Sequence
  SAMD9L targeting guide sequence portion
uaaaaugcuuucucugaagau

SEQ ID NO: 6758 - RNA, 21 nt, Artificial Sequence
  SAMD9L targeting guide sequence portion
ucuaaaaugcuuucucugaag

SEQ ID NO: 6759 - RNA, 21 nt, Artificial Sequence
  SAMD9L targeting guide sequence portion
ucucugaagauuuuaaaaaag

SEQ ID NO: 6760 - RNA, 21 nt, Artificial Sequence
  SAMD9L targeting guide sequence portion
ucuucagagaaagcauuuuag

SEQ ID NO: 6761 - RNA, 21 nt, Artificial Sequence
  SAMD9L targeting guide sequence portion
ucuucuaaaaugcuuucucug

SEQ ID NO: 6762 - RNA, 21 nt, Artificial Sequence
  SAMD9L targeting guide sequence portion
ucuuuuuuaaaaucuucagag

SEQ ID NO: 6763 - RNA, 21 nt, Artificial Sequence
  SAMD9L targeting guide sequence portion
ugcuuucucugaagauuuuaa

SEQ ID NO: 6764 - RNA, 21 nt, Artificial Sequence
  SAMD9L targeting guide sequence portion
uuaaaaucuucagagaaagca

SEQ ID NO: 6765 - RNA, 21 nt, Artificial Sequence
  SAMD9L targeting guide sequence portion
uucuaaaaugcuuucucugaa

SEQ ID NO: 6766 - RNA, 21 nt, Artificial Sequence
  SAMD9L targeting guide sequence portion
uucuucuaaaaugcuuucucu

SEQ ID NO: 6767 - RNA, 21 nt, Artificial Sequence
  SAMD9L targeting guide sequence portion
uuuaaaaucuucagagaaagc

SEQ ID NO: 6768 - RNA, 21 nt, Artificial Sequence
  SAMD9L targeting guide sequence portion
uuuuaaaaucuucagagaaag

SEQ ID NO: 6769 - RNA, 22 nt, Artificial Sequence
  SAMD9L targeting guide sequence portion
aaaaucuucagagaaagcauuu

SEQ ID NO: 6770 - RNA, 22 nt, Artificial Sequence
  SAMD9L targeting guide sequence portion
aaaaugcuuucucugaagauuu

SEQ ID NO: 6771 - RNA, 22 nt, Artificial Sequence
  SAMD9L targeting guide sequence portion
aaaucuucagagaaagcauuuu

SEQ ID NO: 6772 - RNA, 22 nt, Artificial Sequence
  SAMD9L targeting guide sequence portion
aaaugcuuucucugaagauuuu

SEQ ID NO: 6773 - RNA, 22 nt, Artificial Sequence
  SAMD9L targeting guide sequence portion
aaucuucagagaaagcauuuua

SEQ ID NO: 6774 - RNA, 22 nt, Artificial Sequence
  SAMD9L targeting guide sequence portion
aaugcuuucucugaagauuuua

SEQ ID NO: 6775 - RNA, 22 nt, Artificial Sequence
  SAMD9L targeting guide sequence portion
aucuucagagaaagcauuuuag

SEQ ID NO: 6776 - RNA, 22 nt, Artificial Sequence
  SAMD9L targeting guide sequence portion
aucuuuuuuaaaaucuucagag

SEQ ID NO: 6777 - RNA, 22 nt, Artificial Sequence
  SAMD9L targeting guide sequence portion
augcuuucucugaagauuuuaa

SEQ ID NO: 6778 - RNA, 22 nt, Artificial Sequence
  SAMD9L targeting guide sequence portion
cuaaaaugcuuucucugaagau

SEQ ID NO: 6779 - RNA, 22 nt, Artificial Sequence
  SAMD9L targeting guide sequence portion
cucugaagauuuuaaaaaagau

SEQ ID NO: 6780 - RNA, 22 nt, Artificial Sequence
  SAMD9L targeting guide sequence portion
cuucuaaaaugcuuucucugaa

SEQ ID NO: 6781 - RNA, 22 nt, Artificial Sequence
  SAMD9L targeting guide sequence portion
cuuucucugaagauuuuaaaaa

SEQ ID NO: 6782 - RNA, 22 nt, Artificial Sequence
  SAMD9L targeting guide sequence portion
cuuuuuuaaaaucuucagagaa

SEQ ID NO: 6783 - RNA, 22 nt, Artificial Sequence
  SAMD9L targeting guide sequence portion
gcuuucucugaagauuuuaaaa

SEQ ID NO: 6784 - RNA, 22 nt, Artificial Sequence
  SAMD9L targeting guide sequence portion
uaaaaucuucagagaaagcauu

SEQ ID NO: 6785 - RNA, 22 nt, Artificial Sequence
  SAMD9L targeting guide sequence portion
uaaaaugcuuucucugaagauu

SEQ ID NO: 6786 - RNA, 22 nt, Artificial Sequence
  SAMD9L targeting guide sequence portion
ucuaaaaugcuuucucugaaga

SEQ ID NO: 6787 - RNA, 22 nt, Artificial Sequence
  SAMD9L targeting guide sequence portion
ucucugaagauuuuaaaaaaga

SEQ ID NO: 6788 - RNA, 22 nt, Artificial Sequence
  SAMD9L targeting guide sequence portion
ucuucagagaaagcauuuuaga

SEQ ID NO: 6789 - RNA, 22 nt, Artificial Sequence
  SAMD9L targeting guide sequence portion
ucuucuaaaaugcuuucucuga

SEQ ID NO: 6790 - RNA, 22 nt, Artificial Sequence
  SAMD9L targeting guide sequence portion
ucuuuuuuaaaaucuucagaga

SEQ ID NO: 6791 - RNA, 22 nt, Artificial Sequence
  SAMD9L targeting guide sequence portion
ugcuuucucugaagauuuuaaa

SEQ ID NO: 6792 - RNA, 22 nt, Artificial Sequence
  SAMD9L targeting guide sequence portion
uuaaaaucuucagagaaagcau

SEQ ID NO: 6793 - RNA, 22 nt, Artificial Sequence
  SAMD9L targeting guide sequence portion
uucuaaaaugcuuucucugaag

SEQ ID NO: 6794 - RNA, 22 nt, Artificial Sequence
  SAMD9L targeting guide sequence portion
uucucugaagauuuuaaaaaag

SEQ ID NO: 6795 - RNA, 22 nt, Artificial Sequence
  SAMD9L targeting guide sequence portion
uucuucuaaaaugcuuucucug

SEQ ID NO: 6796 - RNA, 22 nt, Artificial Sequence
  SAMD9L targeting guide sequence portion
uuuaaaaucuucagagaaagca

SEQ ID NO: 6797 - RNA, 22 nt, Artificial Sequence
  SAMD9L targeting guide sequence portion
uuucuucuaaaaugcuuucucu

SEQ ID NO: 6798 - RNA, 22 nt, Artificial Sequence
  SAMD9L targeting guide sequence portion
uuuuaaaaucuucagagaaagc

SEQ ID NO: 6799 - RNA, 22 nt, Artificial Sequence
  SAMD9L targeting guide sequence portion
uuuuuaaaaucuucagagaaag

SEQ ID NO: 6800 - RNA, 20 nt, Artificial Sequence
  SAMD9L targeting guide sequence portion
aaaaacaguugcauucuuuu

SEQ ID NO: 6801 - RNA, 20 nt, Artificial Sequence
  SAMD9L targeting guide sequence portion
aaaacaguugcauucuuuuc

SEQ ID NO: 6802 - RNA, 20 nt, Artificial Sequence
  SAMD9L targeting guide sequence portion
aaacaguugcauucuuuuca

SEQ ID NO: 6803 - RNA, 20 nt, Artificial Sequence
  SAMD9L targeting guide sequence portion
aaacugaaaagaaugcaacu

SEQ ID NO: 6804 - RNA, 20 nt, Artificial Sequence
  SAMD9L targeting guide sequence portion
aacaguugcauucuuuucag

SEQ ID NO: 6805 - RNA, 20 nt, Artificial Sequence
  SAMD9L targeting guide sequence portion
aacugaaaagaaugcaacug

SEQ ID NO: 6806 - RNA, 20 nt, Artificial Sequence
  SAMD9L targeting guide sequence portion
acaguugcauucuuuucagu

SEQ ID NO: 6807 - RNA, 20 nt, Artificial Sequence
  SAMD9L targeting guide sequence portion
acugaaaagaaugcaacugu

SEQ ID NO: 6808 - RNA, 20 nt, Artificial Sequence
  SAMD9L targeting guide sequence portion
acuguuuuucucucaccuac

SEQ ID NO: 6809 - RNA, 20 nt, Artificial Sequence
  SAMD9L targeting guide sequence portion
agaaaaacaguugcauucuu

SEQ ID NO: 6810 - RNA, 20 nt, Artificial Sequence
  SAMD9L targeting guide sequence portion
agaaacugaaaagaaugcaa

SEQ ID NO: 6811 - RNA, 20 nt, Artificial Sequence
  SAMD9L targeting guide sequence portion
agagaaaaacaguugcauuc

SEQ ID NO: 6812 - RNA, 20 nt, Artificial Sequence
  SAMD9L targeting guide sequence portion
aucagaaacugaaaagaaug

SEQ ID NO: 6813 - RNA, 20 nt, Artificial Sequence
  SAMD9L targeting guide sequence portion
cagaaacugaaaagaaugca

SEQ ID NO: 6814 - RNA, 20 nt, Artificial Sequence
  SAMD9L targeting guide sequence portion
caguugcauucuuuucaguu

SEQ ID NO: 6815 - RNA, 20 nt, Artificial Sequence
  SAMD9L targeting guide sequence portion
ccacagguaggugagagaaa

SEQ ID NO: 6816 - RNA, 20 nt, Artificial Sequence
  SAMD9L targeting guide sequence portion
cugaaaagaaugcaacuguu

SEQ ID NO: 6817 - RNA, 20 nt, Artificial Sequence
  SAMD9L targeting guide sequence portion
cuguuuuucucucaccuacc

SEQ ID NO: 6818 - RNA, 20 nt, Artificial Sequence
  SAMD9L targeting guide sequence portion
gaaaaacaguugcauucuuu

SEQ ID NO: 6819 - RNA, 20 nt, Artificial Sequence
  SAMD9L targeting guide sequence portion
gaaaagaaugcaacuguuuu

SEQ ID NO: 6820 - RNA, 20 nt, Artificial Sequence
  SAMD9L targeting guide sequence portion
gaaacugaaaagaaugcaac

SEQ ID NO: 6821 - RNA, 20 nt, Artificial Sequence
  SAMD9L targeting guide sequence portion
gagaaaaacaguugcauucu

SEQ ID NO: 6822 - RNA, 20 nt, Artificial Sequence
  SAMD9L targeting guide sequence portion
gagagaaaaacaguugcauu

SEQ ID NO: 6823 - RNA, 20 nt, Artificial Sequence
  SAMD9L targeting guide sequence portion
gccacagguaggugagagaa

SEQ ID NO: 6824 - RNA, 20 nt, Artificial Sequence
  SAMD9L targeting guide sequence portion
ggccacagguaggugagaga

SEQ ID NO: 6825 - RNA, 20 nt, Artificial Sequence
  SAMD9L targeting guide sequence portion
ucagaaacugaaaagaaugc

SEQ ID NO: 6826 - RNA, 20 nt, Artificial Sequence
  SAMD9L targeting guide sequence portion
ugaaaagaaugcaacuguuu

SEQ ID NO: 6827 - RNA, 20 nt, Artificial Sequence
  SAMD9L targeting guide sequence portion
uguuuuucucucaccuaccu

SEQ ID NO: 6828 - RNA, 21 nt, Artificial Sequence
  SAMD9L targeting guide sequence portion
aaaaacaguugcauucuuuuc

SEQ ID NO: 6829 - RNA, 21 nt, Artificial Sequence
  SAMD9L targeting guide sequence portion
aaaacaguugcauucuuuuca

SEQ ID NO: 6830 - RNA, 21 nt, Artificial Sequence
  SAMD9L targeting guide sequence portion
aaacaguugcauucuuuucag

SEQ ID NO: 6831 - RNA, 21 nt, Artificial Sequence
  SAMD9L targeting guide sequence portion
aaacugaaaagaaugcaacug

SEQ ID NO: 6832 - RNA, 21 nt, Artificial Sequence
  SAMD9L targeting guide sequence portion
aacaguugcauucuuuucagu

SEQ ID NO: 6833 - RNA, 21 nt, Artificial Sequence
  SAMD9L targeting guide sequence portion
aacugaaaagaaugcaacugu

SEQ ID NO: 6834 - RNA, 21 nt, Artificial Sequence
  SAMD9L targeting guide sequence portion
aacuguuuuucucucaccuac

SEQ ID NO: 6835 - RNA, 21 nt, Artificial Sequence
  SAMD9L targeting guide sequence portion
aaucagaaacugaaaagaaug

SEQ ID NO: 6836 - RNA, 21 nt, Artificial Sequence
  SAMD9L targeting guide sequence portion
acaguugcauucuuuucaguu

SEQ ID NO: 6837 - RNA, 21 nt, Artificial Sequence
  SAMD9L targeting guide sequence portion
acugaaaagaaugcaacuguu

SEQ ID NO: 6838 - RNA, 21 nt, Artificial Sequence
  SAMD9L targeting guide sequence portion
acuguuuuucucucaccuacc

SEQ ID NO: 6839 - RNA, 21 nt, Artificial Sequence
  SAMD9L targeting guide sequence portion
agaaaaacaguugcauucuuu

SEQ ID NO: 6840 - RNA, 21 nt, Artificial Sequence
  SAMD9L targeting guide sequence portion
agaaacugaaaagaaugcaac

SEQ ID NO: 6841 - RNA, 21 nt, Artificial Sequence
  SAMD9L targeting guide sequence portion
agagaaaaacaguugcauucu

SEQ ID NO: 6842 - RNA, 21 nt, Artificial Sequence
  SAMD9L targeting guide sequence portion
aggccacagguaggugagaga

SEQ ID NO: 6843 - RNA, 21 nt, Artificial Sequence
  SAMD9L targeting guide sequence portion
aucagaaacugaaaagaaugc

SEQ ID NO: 6844 - RNA, 21 nt, Artificial Sequence
  SAMD9L targeting guide sequence portion
cagaaacugaaaagaaugcaa

SEQ ID NO: 6845 - RNA, 21 nt, Artificial Sequence
  SAMD9L targeting guide sequence portion
caguugcauucuuuucaguuu

SEQ ID NO: 6846 - RNA, 21 nt, Artificial Sequence
  SAMD9L targeting guide sequence portion
ccacagguaggugagagaaaa

SEQ ID NO: 6847 - RNA, 21 nt, Artificial Sequence
  SAMD9L targeting guide sequence portion
cugaaaagaaugcaacuguuu

SEQ ID NO: 6848 - RNA, 21 nt, Artificial Sequence
  SAMD9L targeting guide sequence portion
cuguuuuucucucaccuaccu

SEQ ID NO: 6849 - RNA, 21 nt, Artificial Sequence
  SAMD9L targeting guide sequence portion
gaaaaacaguugcauucuuuu

SEQ ID NO: 6850 - RNA, 21 nt, Artificial Sequence
  SAMD9L targeting guide sequence portion
gaaaagaaugcaacuguuuuu

SEQ ID NO: 6851 - RNA, 21 nt, Artificial Sequence
  SAMD9L targeting guide sequence portion
gaaacugaaaagaaugcaacu

SEQ ID NO: 6852 - RNA, 21 nt, Artificial Sequence
  SAMD9L targeting guide sequence portion
gagaaaaacaguugcauucuu

SEQ ID NO: 6853 - RNA, 21 nt, Artificial Sequence
  SAMD9L targeting guide sequence portion
gagagaaaaacaguugcauuc

SEQ ID NO: 6854 - RNA, 21 nt, Artificial Sequence
  SAMD9L targeting guide sequence portion
gccacagguaggugagagaaa

SEQ ID NO: 6855 - RNA, 21 nt, Artificial Sequence
  SAMD9L targeting guide sequence portion
ggccacagguaggugagagaa

SEQ ID NO: 6856 - RNA, 21 nt, Artificial Sequence
  SAMD9L targeting guide sequence portion
ucagaaacugaaaagaaugca

SEQ ID NO: 6857 - RNA, 21 nt, Artificial Sequence
  SAMD9L targeting guide sequence portion
ugaaaagaaugcaacuguuuu

SEQ ID NO: 6858 - RNA, 21 nt, Artificial Sequence
  SAMD9L targeting guide sequence portion
ugagagaaaaacaguugcauu

SEQ ID NO: 6859 - RNA, 21 nt, Artificial Sequence
  SAMD9L targeting guide sequence portion
uguuuuucucucaccuaccug

SEQ ID NO: 6860 - RNA, 22 nt, Artificial Sequence
  SAMD9L targeting guide sequence portion
aaaaacaguugcauucuuuuca

SEQ ID NO: 6861 - RNA, 22 nt, Artificial Sequence
  SAMD9L targeting guide sequence portion
aaaacaguugcauucuuuucag

SEQ ID NO: 6862 - RNA, 22 nt, Artificial Sequence
  SAMD9L targeting guide sequence portion
aaacaguugcauucuuuucagu

SEQ ID NO: 6863 - RNA, 22 nt, Artificial Sequence
  SAMD9L targeting guide sequence portion
aaacugaaaagaaugcaacugu

SEQ ID NO: 6864 - RNA, 22 nt, Artificial Sequence
  SAMD9L targeting guide sequence portion
aacaguugcauucuuuucaguu

SEQ ID NO: 6865 - RNA, 22 nt, Artificial Sequence
  SAMD9L targeting guide sequence portion
aacugaaaagaaugcaacuguu

SEQ ID NO: 6866 - RNA, 22 nt, Artificial Sequence
  SAMD9L targeting guide sequence portion
aacuguuuuucucucaccuacc

SEQ ID NO: 6867 - RNA, 22 nt, Artificial Sequence
  SAMD9L targeting guide sequence portion
aaucagaaacugaaaagaaugc

SEQ ID NO: 6868 - RNA, 22 nt, Artificial Sequence
  SAMD9L targeting guide sequence portion
acaguugcauucuuuucaguuu

SEQ ID NO: 6869 - RNA, 22 nt, Artificial Sequence
  SAMD9L targeting guide sequence portion
acugaaaagaaugcaacuguuu

SEQ ID NO: 6870 - RNA, 22 nt, Artificial Sequence
  SAMD9L targeting guide sequence portion
acuguuuuucucucaccuaccu

SEQ ID NO: 6871 - RNA, 22 nt, Artificial Sequence
  SAMD9L targeting guide sequence portion
agaaaaacaguugcauucuuuu

SEQ ID NO: 6872 - RNA, 22 nt, Artificial Sequence
  SAMD9L targeting guide sequence portion
agaaacugaaaagaaugcaacu

SEQ ID NO: 6873 - RNA, 22 nt, Artificial Sequence
  SAMD9L targeting guide sequence portion
agagaaaaacaguugcauucuu

SEQ ID NO: 6874 - RNA, 22 nt, Artificial Sequence
  SAMD9L targeting guide sequence portion
aggccacagguaggugagagaa

SEQ ID NO: 6875 - RNA, 22 nt, Artificial Sequence
  SAMD9L targeting guide sequence portion
aguugcauucuuuucaguuucu

SEQ ID NO: 6876 - RNA, 22 nt, Artificial Sequence
  SAMD9L targeting guide sequence portion
aucagaaacugaaaagaaugca

SEQ ID NO: 6877 - RNA, 22 nt, Artificial Sequence
  SAMD9L targeting guide sequence portion
caacuguuuuucucucaccuac

SEQ ID NO: 6878 - RNA, 22 nt, Artificial Sequence
  SAMD9L targeting guide sequence portion
cagaaacugaaaagaaugcaac

SEQ ID NO: 6879 - RNA, 22 nt, Artificial Sequence
  SAMD9L targeting guide sequence portion
caggccacagguaggugagaga

SEQ ID NO: 6880 - RNA, 22 nt, Artificial Sequence
  SAMD9L targeting guide sequence portion
caguugcauucuuuucaguuuc

SEQ ID NO: 6881 - RNA, 22 nt, Artificial Sequence
  SAMD9L targeting guide sequence portion
ccacagguaggugagagaaaaa

SEQ ID NO: 6882 - RNA, 22 nt, Artificial Sequence
  SAMD9L targeting guide sequence portion
cugaaaagaaugcaacuguuuu

SEQ ID NO: 6883 - RNA, 22 nt, Artificial Sequence
  SAMD9L targeting guide sequence portion
cuguuuuucucucaccuaccug

SEQ ID NO: 6884 - RNA, 22 nt, Artificial Sequence
  SAMD9L targeting guide sequence portion
gaaaaacaguugcauucuuuuc

SEQ ID NO: 6885 - RNA, 22 nt, Artificial Sequence
  SAMD9L targeting guide sequence portion
gaaaagaaugcaacuguuuuuc

SEQ ID NO: 6886 - RNA, 22 nt, Artificial Sequence
  SAMD9L targeting guide sequence portion
gaaacugaaaagaaugcaacug

SEQ ID NO: 6887 - RNA, 22 nt, Artificial Sequence
  SAMD9L targeting guide sequence portion
gagaaaaacaguugcauucuuu

SEQ ID NO: 6888 - RNA, 22 nt, Artificial Sequence
  SAMD9L targeting guide sequence portion
gagagaaaaacaguugcauucu

SEQ ID NO: 6889 - RNA, 22 nt, Artificial Sequence
  SAMD9L targeting guide sequence portion
gccacagguaggugagagaaaa

SEQ ID NO: 6890 - RNA, 22 nt, Artificial Sequence
  SAMD9L targeting guide sequence portion
ggccacagguaggugagagaaa

SEQ ID NO: 6891 - RNA, 22 nt, Artificial Sequence
  SAMD9L targeting guide sequence portion
gugagagaaaaacaguugcauu

SEQ ID NO: 6892 - RNA, 22 nt, Artificial Sequence
  SAMD9L targeting guide sequence portion
uaaucagaaacugaaaagaaug

SEQ ID NO: 6893 - RNA, 22 nt, Artificial Sequence
  SAMD9L targeting guide sequence portion
ucagaaacugaaaagaaugcaa

SEQ ID NO: 6894 - RNA, 22 nt, Artificial Sequence
  SAMD9L targeting guide sequence portion
ugaaaagaaugcaacuguuuuu

SEQ ID NO: 6895 - RNA, 22 nt, Artificial Sequence
  SAMD9L targeting guide sequence portion
ugagagaaaaacaguugcauuc

SEQ ID NO: 6896 - RNA, 22 nt, Artificial Sequence
  SAMD9L targeting guide sequence portion
uguuuuucucucaccuaccugu

SEQ ID NO: 6897 - RNA, 22 nt, Artificial Sequence
  SAMD9L targeting guide sequence portion
uuaaucagaaacugaaaagaau

SEQ ID NO: 6898 - RNA, 20 nt, Artificial Sequence
  SAMD9L targeting guide sequence portion
aaaaacuguugcauucuuuu

SEQ ID NO: 6899 - RNA, 20 nt, Artificial Sequence
  SAMD9L targeting guide sequence portion
aaaacuguugcauucuuuuc

SEQ ID NO: 6900 - RNA, 20 nt, Artificial Sequence
  SAMD9L targeting guide sequence portion
aaaagaaugcaacaguuuuu

SEQ ID NO: 6901 - RNA, 20 nt, Artificial Sequence
  SAMD9L targeting guide sequence portion
aaacugaaaagaaugcaaca

SEQ ID NO: 6902 - RNA, 20 nt, Artificial Sequence
  SAMD9L targeting guide sequence portion
aaagaaugcaacaguuuuuc

SEQ ID NO: 6903 - RNA, 20 nt, Artificial Sequence
  SAMD9L targeting guide sequence portion
aacugaaaagaaugcaacag

SEQ ID NO: 6904 - RNA, 20 nt, Artificial Sequence
  SAMD9L targeting guide sequence portion
aagaaugcaacaguuuuucu

SEQ ID NO: 6905 - RNA, 20 nt, Artificial Sequence
  SAMD9L targeting guide sequence portion
acaguuuuucucucaccuac

SEQ ID NO: 6906 - RNA, 20 nt, Artificial Sequence
  SAMD9L targeting guide sequence portion
acugaaaagaaugcaacagu

SEQ ID NO: 6907 - RNA, 20 nt, Artificial Sequence
  SAMD9L targeting guide sequence portion
agaaaaacuguugcauucuu

SEQ ID NO: 6908 - RNA, 20 nt, Artificial Sequence
  SAMD9L targeting guide sequence portion
agaaugcaacaguuuuucuc

SEQ ID NO: 6909 - RNA, 20 nt, Artificial Sequence
  SAMD9L targeting guide sequence portion
agagaaaaacuguugcauuc

SEQ ID NO: 6910 - RNA, 20 nt, Artificial Sequence
  SAMD9L targeting guide sequence portion
aggugagagaaaaacuguug

SEQ ID NO: 6911 - RNA, 20 nt, Artificial Sequence
  SAMD9L targeting guide sequence portion
aguuuuucucucaccuaccu

SEQ ID NO: 6912 - RNA, 20 nt, Artificial Sequence
  SAMD9L targeting guide sequence portion
caguuuuucucucaccuacc

SEQ ID NO: 6913 - RNA, 20 nt, Artificial Sequence
  SAMD9L targeting guide sequence portion
cugaaaagaaugcaacaguu

SEQ ID NO: 6914 - RNA, 20 nt, Artificial Sequence
  SAMD9L targeting guide sequence portion
gaaaaacuguugcauucuuu

SEQ ID NO: 6915 - RNA, 20 nt, Artificial Sequence
  SAMD9L targeting guide sequence portion
gaaaagaaugcaacaguuuu

SEQ ID NO: 6916 - RNA, 20 nt, Artificial Sequence
  SAMD9L targeting guide sequence portion
gaaugcaacaguuuuucucu

SEQ ID NO: 6917 - RNA, 20 nt, Artificial Sequence
  SAMD9L targeting guide sequence portion
gagaaaaacuguugcauucu

SEQ ID NO: 6918 - RNA, 20 nt, Artificial Sequence
  SAMD9L targeting guide sequence portion
gagagaaaaacuguugcauu

SEQ ID NO: 6919 - RNA, 20 nt, Artificial Sequence
  SAMD9L targeting guide sequence portion
ggugagagaaaaacuguugc

SEQ ID NO: 6920 - RNA, 20 nt, Artificial Sequence
  SAMD9L targeting guide sequence portion
gugagagaaaaacuguugca

SEQ ID NO: 6921 - RNA, 20 nt, Artificial Sequence
  SAMD9L targeting guide sequence portion
uaggugagagaaaaacuguu

SEQ ID NO: 6922 - RNA, 20 nt, Artificial Sequence
  SAMD9L targeting guide sequence portion
ugaaaagaaugcaacaguuu

SEQ ID NO: 6923 - RNA, 20 nt, Artificial Sequence
  SAMD9L targeting guide sequence portion
ugagagaaaaacuguugcau

SEQ ID NO: 6924 - RNA, 21 nt, Artificial Sequence
  SAMD9L targeting guide sequence portion
aaaaacuguugcauucuuuuc

SEQ ID NO: 6925 - RNA, 21 nt, Artificial Sequence
  SAMD9L targeting guide sequence portion
aaaacuguugcauucuuuuca

SEQ ID NO: 6926 - RNA, 21 nt, Artificial Sequence
  SAMD9L targeting guide sequence portion
aaaagaaugcaacaguuuuuc

SEQ ID NO: 6927 - RNA, 21 nt, Artificial Sequence
  SAMD9L targeting guide sequence portion
aaacugaaaagaaugcaacag

SEQ ID NO: 6928 - RNA, 21 nt, Artificial Sequence
  SAMD9L targeting guide sequence portion
aaagaaugcaacaguuuuucu

SEQ ID NO: 6929 - RNA, 21 nt, Artificial Sequence
  SAMD9L targeting guide sequence portion
aacaguuuuucucucaccuac

SEQ ID NO: 6930 - RNA, 21 nt, Artificial Sequence
  SAMD9L targeting guide sequence portion
aacugaaaagaaugcaacagu

SEQ ID NO: 6931 - RNA, 21 nt, Artificial Sequence
  SAMD9L targeting guide sequence portion
aagaaugcaacaguuuuucuc

SEQ ID NO: 6932 - RNA, 21 nt, Artificial Sequence
  SAMD9L targeting guide sequence portion
acaguuuuucucucaccuacc

SEQ ID NO: 6933 - RNA, 21 nt, Artificial Sequence
  SAMD9L targeting guide sequence portion
acugaaaagaaugcaacaguu

SEQ ID NO: 6934 - RNA, 21 nt, Artificial Sequence
  SAMD9L targeting guide sequence portion
agaaaaacuguugcauucuuu

SEQ ID NO: 6935 - RNA, 21 nt, Artificial Sequence
  SAMD9L targeting guide sequence portion
agaaugcaacaguuuuucucu

SEQ ID NO: 6936 - RNA, 21 nt, Artificial Sequence
  SAMD9L targeting guide sequence portion
agagaaaaacuguugcauucu

SEQ ID NO: 6937 - RNA, 21 nt, Artificial Sequence
  SAMD9L targeting guide sequence portion
aggugagagaaaaacuguugc

SEQ ID NO: 6938 - RNA, 21 nt, Artificial Sequence
  SAMD9L targeting guide sequence portion
aguuuuucucucaccuaccug

SEQ ID NO: 6939 - RNA, 21 nt, Artificial Sequence
  SAMD9L targeting guide sequence portion
caguuuuucucucaccuaccu

SEQ ID NO: 6940 - RNA, 21 nt, Artificial Sequence
  SAMD9L targeting guide sequence portion
cugaaaagaaugcaacaguuu

SEQ ID NO: 6941 - RNA, 21 nt, Artificial Sequence
  SAMD9L targeting guide sequence portion
gaaaaacuguugcauucuuuu

SEQ ID NO: 6942 - RNA, 21 nt, Artificial Sequence
  SAMD9L targeting guide sequence portion
gaaaagaaugcaacaguuuuu

SEQ ID NO: 6943 - RNA, 21 nt, Artificial Sequence
  SAMD9L targeting guide sequence portion
gaaacugaaaagaaugcaaca

SEQ ID NO: 6944 - RNA, 21 nt, Artificial Sequence
  SAMD9L targeting guide sequence portion
gaaugcaacaguuuuucucuc

SEQ ID NO: 6945 - RNA, 21 nt, Artificial Sequence
  SAMD9L targeting guide sequence portion
gagaaaaacuguugcauucuu

SEQ ID NO: 6946 - RNA, 21 nt, Artificial Sequence
  SAMD9L targeting guide sequence portion
gagagaaaaacuguugcauuc

SEQ ID NO: 6947 - RNA, 21 nt, Artificial Sequence
  SAMD9L targeting guide sequence portion
ggugagagaaaaacuguugca

SEQ ID NO: 6948 - RNA, 21 nt, Artificial Sequence
  SAMD9L targeting guide sequence portion
guaggugagagaaaaacuguu

SEQ ID NO: 6949 - RNA, 21 nt, Artificial Sequence
  SAMD9L targeting guide sequence portion
gugagagaaaaacuguugcau

SEQ ID NO: 6950 - RNA, 21 nt, Artificial Sequence
  SAMD9L targeting guide sequence portion
uaggugagagaaaaacuguug

SEQ ID NO: 6951 - RNA, 21 nt, Artificial Sequence
  SAMD9L targeting guide sequence portion
ugaaaagaaugcaacaguuuu

SEQ ID NO: 6952 - RNA, 21 nt, Artificial Sequence
  SAMD9L targeting guide sequence portion
ugagagaaaaacuguugcauu

SEQ ID NO: 6953 - RNA, 22 nt, Artificial Sequence
  SAMD9L targeting guide sequence portion
aaaaacuguugcauucuuuuca

SEQ ID NO: 6954 - RNA, 22 nt, Artificial Sequence
  SAMD9L targeting guide sequence portion
aaaacuguugcauucuuuucag

SEQ ID NO: 6955 - RNA, 22 nt, Artificial Sequence
  SAMD9L targeting guide sequence portion
aaaagaaugcaacaguuuuucu

SEQ ID NO: 6956 - RNA, 22 nt, Artificial Sequence
  SAMD9L targeting guide sequence portion
aaacugaaaagaaugcaacagu

SEQ ID NO: 6957 - RNA, 22 nt, Artificial Sequence
  SAMD9L targeting guide sequence portion
aaagaaugcaacaguuuuucuc

SEQ ID NO: 6958 - RNA, 22 nt, Artificial Sequence
  SAMD9L targeting guide sequence portion
aacaguuuuucucucaccuacc

SEQ ID NO: 6959 - RNA, 22 nt, Artificial Sequence
  SAMD9L targeting guide sequence portion
aacugaaaagaaugcaacaguu

SEQ ID NO: 6960 - RNA, 22 nt, Artificial Sequence
  SAMD9L targeting guide sequence portion
aagaaugcaacaguuuuucucu

SEQ ID NO: 6961 - RNA, 22 nt, Artificial Sequence
  SAMD9L targeting guide sequence portion
acaguuuuucucucaccuaccu

SEQ ID NO: 6962 - RNA, 22 nt, Artificial Sequence
  SAMD9L targeting guide sequence portion
acugaaaagaaugcaacaguuu

SEQ ID NO: 6963 - RNA, 22 nt, Artificial Sequence
  SAMD9L targeting guide sequence portion
agaaaaacuguugcauucuuuu

SEQ ID NO: 6964 - RNA, 22 nt, Artificial Sequence
  SAMD9L targeting guide sequence portion
agaaacugaaaagaaugcaaca

SEQ ID NO: 6965 - RNA, 22 nt, Artificial Sequence
  SAMD9L targeting guide sequence portion
agaaugcaacaguuuuucucuc

SEQ ID NO: 6966 - RNA, 22 nt, Artificial Sequence
  SAMD9L targeting guide sequence portion
agagaaaaacuguugcauucuu

SEQ ID NO: 6967 - RNA, 22 nt, Artificial Sequence
  SAMD9L targeting guide sequence portion
aggugagagaaaaacuguugca

SEQ ID NO: 6968 - RNA, 22 nt, Artificial Sequence
  SAMD9L targeting guide sequence portion
aguuuuucucucaccuaccugu

SEQ ID NO: 6969 - RNA, 22 nt, Artificial Sequence
  SAMD9L targeting guide sequence portion
caacaguuuuucucucaccuac

SEQ ID NO: 6970 - RNA, 22 nt, Artificial Sequence
  SAMD9L targeting guide sequence portion
caguuuuucucucaccuaccug

SEQ ID NO: 6971 - RNA, 22 nt, Artificial Sequence
  SAMD9L targeting guide sequence portion
cugaaaagaaugcaacaguuuu

SEQ ID NO: 6972 - RNA, 22 nt, Artificial Sequence
  SAMD9L targeting guide sequence portion
gaaaaacuguugcauucuuuuc

SEQ ID NO: 6973 - RNA, 22 nt, Artificial Sequence
  SAMD9L targeting guide sequence portion
gaaaagaaugcaacaguuuuuc

SEQ ID NO: 6974 - RNA, 22 nt, Artificial Sequence
  SAMD9L targeting guide sequence portion
gaaacugaaaagaaugcaacag

SEQ ID NO: 6975 - RNA, 22 nt, Artificial Sequence
  SAMD9L targeting guide sequence portion
gaaugcaacaguuuuucucuca

SEQ ID NO: 6976 - RNA, 22 nt, Artificial Sequence
  SAMD9L targeting guide sequence portion
gagaaaaacuguugcauucuuu

SEQ ID NO: 6977 - RNA, 22 nt, Artificial Sequence
  SAMD9L targeting guide sequence portion
gagagaaaaacuguugcauucu

SEQ ID NO: 6978 - RNA, 22 nt, Artificial Sequence
  SAMD9L targeting guide sequence portion
gguaggugagagaaaaacuguu

SEQ ID NO: 6979 - RNA, 22 nt, Artificial Sequence
  SAMD9L targeting guide sequence portion
ggugagagaaaaacuguugcau

SEQ ID NO: 6980 - RNA, 22 nt, Artificial Sequence
  SAMD9L targeting guide sequence portion
guaggugagagaaaaacuguug

SEQ ID NO: 6981 - RNA, 22 nt, Artificial Sequence
  SAMD9L targeting guide sequence portion
gugagagaaaaacuguugcauu

SEQ ID NO: 6982 - RNA, 22 nt, Artificial Sequence
  SAMD9L targeting guide sequence portion
uaggugagagaaaaacuguugc

SEQ ID NO: 6983 - RNA, 22 nt, Artificial Sequence
  SAMD9L targeting guide sequence portion
ugaaaagaaugcaacaguuuuu

SEQ ID NO: 6984 - RNA, 22 nt, Artificial Sequence
  SAMD9L targeting guide sequence portion
ugagagaaaaacuguugcauuc

SEQ ID NO: 6985 - RNA, 22 nt, Artificial Sequence
  SAMD9L targeting guide sequence portion
uguugcauucuuuucaguuucu

SEQ ID NO: 6986 - RNA, 20 nt, Artificial Sequence
  SAMD9L targeting guide sequence portion
aaaaccaagcugugcaccuu

SEQ ID NO: 6987 - RNA, 20 nt, Artificial Sequence
  SAMD9L targeting guide sequence portion
aaaccaagcugugcaccuug

SEQ ID NO: 6988 - RNA, 20 nt, Artificial Sequence
  SAMD9L targeting guide sequence portion
aacauguucccaaggugcac

SEQ ID NO: 6989 - RNA, 20 nt, Artificial Sequence
  SAMD9L targeting guide sequence portion
aaccaagcugugcaccuugg

SEQ ID NO: 6990 - RNA, 20 nt, Artificial Sequence
  SAMD9L targeting guide sequence portion
aagcugugcaccuugggaac

SEQ ID NO: 6991 - RNA, 20 nt, Artificial Sequence
  SAMD9L targeting guide sequence portion
aagguccugauaacauguuc

SEQ ID NO: 6992 - RNA, 20 nt, Artificial Sequence
  SAMD9L targeting guide sequence portion
acauguucccaaggugcaca

SEQ ID NO: 6993 - RNA, 20 nt, Artificial Sequence
  SAMD9L targeting guide sequence portion
accaagcugugcaccuuggg

SEQ ID NO: 6994 - RNA, 20 nt, Artificial Sequence
  SAMD9L targeting guide sequence portion
accuugggaacauguuauca

SEQ ID NO: 6995 - RNA, 20 nt, Artificial Sequence
  SAMD9L targeting guide sequence portion
agaagguccugauaacaugu

SEQ ID NO: 6996 - RNA, 20 nt, Artificial Sequence
  SAMD9L targeting guide sequence portion
agcugugcaccuugggaaca

SEQ ID NO: 6997 - RNA, 20 nt, Artificial Sequence
  SAMD9L targeting guide sequence portion
agguccugauaacauguucc

SEQ ID NO: 6998 - RNA, 20 nt, Artificial Sequence
  SAMD9L targeting guide sequence portion
auaaaaccaagcugugcacc

SEQ ID NO: 6999 - RNA, 20 nt, Artificial Sequence
  SAMD9L targeting guide sequence portion
auaacauguucccaaggugc

SEQ ID NO: 7000 - RNA, 20 nt, Artificial Sequence
  SAMD9L targeting guide sequence portion
auauaaaaccaagcugugca

SEQ ID NO: 7001 - RNA, 20 nt, Artificial Sequence
  SAMD9L targeting guide sequence portion
auguucccaaggugcacagc

SEQ ID NO: 7002 - RNA, 20 nt, Artificial Sequence
  SAMD9L targeting guide sequence portion
caagcugugcaccuugggaa

SEQ ID NO: 7003 - RNA, 20 nt, Artificial Sequence
  SAMD9L targeting guide sequence portion
caccuugggaacauguuauc

SEQ ID NO: 7004 - RNA, 20 nt, Artificial Sequence
  SAMD9L targeting guide sequence portion
cagaagguccugauaacaug

SEQ ID NO: 7005 - RNA, 20 nt, Artificial Sequence
  SAMD9L targeting guide sequence portion
cauguucccaaggugcacag

SEQ ID NO: 7006 - RNA, 20 nt, Artificial Sequence
  SAMD9L targeting guide sequence portion
ccaagcugugcaccuuggga

SEQ ID NO: 7007 - RNA, 20 nt, Artificial Sequence
  SAMD9L targeting guide sequence portion
ccaaggugcacagcuugguu

SEQ ID NO: 7008 - RNA, 20 nt, Artificial Sequence
  SAMD9L targeting guide sequence portion
cccaaggugcacagcuuggu

SEQ ID NO: 7009 - RNA, 20 nt, Artificial Sequence
  SAMD9L targeting guide sequence portion
ccugauaacauguucccaag

SEQ ID NO: 7010 - RNA, 20 nt, Artificial Sequence
  SAMD9L targeting guide sequence portion
ccuugggaacauguuaucag

SEQ ID NO: 7011 - RNA, 20 nt, Artificial Sequence
  SAMD9L targeting guide sequence portion
cucagaagguccugauaaca

SEQ ID NO: 7012 - RNA, 20 nt, Artificial Sequence
  SAMD9L targeting guide sequence portion
cugauaacauguucccaagg

SEQ ID NO: 7013 - RNA, 20 nt, Artificial Sequence
  SAMD9L targeting guide sequence portion
cugugcaccuugggaacaug

SEQ ID NO: 7014 - RNA, 20 nt, Artificial Sequence
  SAMD9L targeting guide sequence portion
cuugggaacauguuaucagg

SEQ ID NO: 7015 - RNA, 20 nt, Artificial Sequence
  SAMD9L targeting guide sequence portion
gaagguccugauaacauguu

SEQ ID NO: 7016 - RNA, 20 nt, Artificial Sequence
  SAMD9L targeting guide sequence portion
gauaacauguucccaaggug

SEQ ID NO: 7017 - RNA, 20 nt, Artificial Sequence
  SAMD9L targeting guide sequence portion
gcaccuugggaacauguuau

SEQ ID NO: 7018 - RNA, 20 nt, Artificial Sequence
  SAMD9L targeting guide sequence portion
gcugugcaccuugggaacau

SEQ ID NO: 7019 - RNA, 20 nt, Artificial Sequence
  SAMD9L targeting guide sequence portion
ggaacauguuaucaggaccu

SEQ ID NO: 7020 - RNA, 20 nt, Artificial Sequence
  SAMD9L targeting guide sequence portion
gggaacauguuaucaggacc

SEQ ID NO: 7021 - RNA, 20 nt, Artificial Sequence
  SAMD9L targeting guide sequence portion
gguccugauaacauguuccc

SEQ ID NO: 7022 - RNA, 20 nt, Artificial Sequence
  SAMD9L targeting guide sequence portion
guccugauaacauguuccca

SEQ ID NO: 7023 - RNA, 20 nt, Artificial Sequence
  SAMD9L targeting guide sequence portion
gugcaccuugggaacauguu

SEQ ID NO: 7024 - RNA, 20 nt, Artificial Sequence
  SAMD9L targeting guide sequence portion
guucccaaggugcacagcuu

SEQ ID NO: 7025 - RNA, 20 nt, Artificial Sequence
  SAMD9L targeting guide sequence portion
uaaaaccaagcugugcaccu

SEQ ID NO: 7026 - RNA, 20 nt, Artificial Sequence
  SAMD9L targeting guide sequence portion
uaacauguucccaaggugca

SEQ ID NO: 7027 - RNA, 20 nt, Artificial Sequence
  SAMD9L targeting guide sequence portion
uauaaaaccaagcugugcac

SEQ ID NO: 7028 - RNA, 20 nt, Artificial Sequence
  SAMD9L targeting guide sequence portion
ucagaagguccugauaacau

SEQ ID NO: 7029 - RNA, 20 nt, Artificial Sequence
  SAMD9L targeting guide sequence portion
ucccaaggugcacagcuugg

SEQ ID NO: 7030 - RNA, 20 nt, Artificial Sequence
  SAMD9L targeting guide sequence portion
uccugauaacauguucccaa

SEQ ID NO: 7031 - RNA, 20 nt, Artificial Sequence
  SAMD9L targeting guide sequence portion
ugauaacauguucccaaggu

SEQ ID NO: 7032 - RNA, 20 nt, Artificial Sequence
  SAMD9L targeting guide sequence portion
ugcaccuugggaacauguua

SEQ ID NO: 7033 - RNA, 20 nt, Artificial Sequence
  SAMD9L targeting guide sequence portion
ugggaacauguuaucaggac

SEQ ID NO: 7034 - RNA, 20 nt, Artificial Sequence
  SAMD9L targeting guide sequence portion
ugugcaccuugggaacaugu

SEQ ID NO: 7035 - RNA, 20 nt, Artificial Sequence
  SAMD9L targeting guide sequence portion
uguucccaaggugcacagcu

SEQ ID NO: 7036 - RNA, 20 nt, Artificial Sequence
  SAMD9L targeting guide sequence portion
uucccaaggugcacagcuug

SEQ ID NO: 7037 - RNA, 20 nt, Artificial Sequence
  SAMD9L targeting guide sequence portion
uugggaacauguuaucagga

SEQ ID NO: 7038 - RNA, 21 nt, Artificial Sequence
  SAMD9L targeting guide sequence portion
aaaaccaagcugugcaccuug

SEQ ID NO: 7039 - RNA, 21 nt, Artificial Sequence
  SAMD9L targeting guide sequence portion
aaaccaagcugugcaccuugg

SEQ ID NO: 7040 - RNA, 21 nt, Artificial Sequence
  SAMD9L targeting guide sequence portion
aacauguucccaaggugcaca

SEQ ID NO: 7041 - RNA, 21 nt, Artificial Sequence
  SAMD9L targeting guide sequence portion
aaccaagcugugcaccuuggg

SEQ ID NO: 7042 - RNA, 21 nt, Artificial Sequence
  SAMD9L targeting guide sequence portion
aagcugugcaccuugggaaca

SEQ ID NO: 7043 - RNA, 21 nt, Artificial Sequence
  SAMD9L targeting guide sequence portion
aagguccugauaacauguucc

SEQ ID NO: 7044 - RNA, 21 nt, Artificial Sequence
  SAMD9L targeting guide sequence portion
acauguucccaaggugcacag

SEQ ID NO: 7045 - RNA, 21 nt, Artificial Sequence
  SAMD9L targeting guide sequence portion
accaagcugugcaccuuggga

SEQ ID NO: 7046 - RNA, 21 nt, Artificial Sequence
  SAMD9L targeting guide sequence portion
accuugggaacauguuaucag

SEQ ID NO: 7047 - RNA, 21 nt, Artificial Sequence
  SAMD9L targeting guide sequence portion
agaagguccugauaacauguu

SEQ ID NO: 7048 - RNA, 21 nt, Artificial Sequence
  SAMD9L targeting guide sequence portion
agcugugcaccuugggaacau

SEQ ID NO: 7049 - RNA, 21 nt, Artificial Sequence
  SAMD9L targeting guide sequence portion
agguccugauaacauguuccc

SEQ ID NO: 7050 - RNA, 21 nt, Artificial Sequence
  SAMD9L targeting guide sequence portion
auaaaaccaagcugugcaccu

SEQ ID NO: 7051 - RNA, 21 nt, Artificial Sequence
  SAMD9L targeting guide sequence portion
auaacauguucccaaggugca

SEQ ID NO: 7052 - RNA, 21 nt, Artificial Sequence
  SAMD9L targeting guide sequence portion
auauaaaaccaagcugugcac

SEQ ID NO: 7053 - RNA, 21 nt, Artificial Sequence
  SAMD9L targeting guide sequence portion
auguucccaaggugcacagcu

SEQ ID NO: 7054 - RNA, 21 nt, Artificial Sequence
  SAMD9L targeting guide sequence portion
caagcugugcaccuugggaac

SEQ ID NO: 7055 - RNA, 21 nt, Artificial Sequence
  SAMD9L targeting guide sequence portion
caccuugggaacauguuauca

SEQ ID NO: 7056 - RNA, 21 nt, Artificial Sequence
  SAMD9L targeting guide sequence portion
cagaagguccugauaacaugu

SEQ ID NO: 7057 - RNA, 21 nt, Artificial Sequence
  SAMD9L targeting guide sequence portion
cauguucccaaggugcacagc

SEQ ID NO: 7058 - RNA, 21 nt, Artificial Sequence
  SAMD9L targeting guide sequence portion
ccaagcugugcaccuugggaa

SEQ ID NO: 7059 - RNA, 21 nt, Artificial Sequence
  SAMD9L targeting guide sequence portion
ccaaggugcacagcuugguuu

SEQ ID NO: 7060 - RNA, 21 nt, Artificial Sequence
  SAMD9L targeting guide sequence portion
cccaaggugcacagcuugguu

SEQ ID NO: 7061 - RNA, 21 nt, Artificial Sequence
  SAMD9L targeting guide sequence portion
ccucagaagguccugauaaca

SEQ ID NO: 7062 - RNA, 21 nt, Artificial Sequence
  SAMD9L targeting guide sequence portion
ccugauaacauguucccaagg

SEQ ID NO: 7063 - RNA, 21 nt, Artificial Sequence
  SAMD9L targeting guide sequence portion
ccuugggaacauguuaucagg

SEQ ID NO: 7064 - RNA, 21 nt, Artificial Sequence
  SAMD9L targeting guide sequence portion
cucagaagguccugauaacau

SEQ ID NO: 7065 - RNA, 21 nt, Artificial Sequence
  SAMD9L targeting guide sequence portion
cugauaacauguucccaaggu

SEQ ID NO: 7066 - RNA, 21 nt, Artificial Sequence
  SAMD9L targeting guide sequence portion
cugugcaccuugggaacaugu

SEQ ID NO: 7067 - RNA, 21 nt, Artificial Sequence
  SAMD9L targeting guide sequence portion
cuugggaacauguuaucagga

SEQ ID NO: 7068 - RNA, 21 nt, Artificial Sequence
  SAMD9L targeting guide sequence portion
gaagguccugauaacauguuc

SEQ ID NO: 7069 - RNA, 21 nt, Artificial Sequence
  SAMD9L targeting guide sequence portion
gauaacauguucccaaggugc

SEQ ID NO: 7070 - RNA, 21 nt, Artificial Sequence
  SAMD9L targeting guide sequence portion
gcaccuugggaacauguuauc

SEQ ID NO: 7071 - RNA, 21 nt, Artificial Sequence
  SAMD9L targeting guide sequence portion
gcugugcaccuugggaacaug

SEQ ID NO: 7072 - RNA, 21 nt, Artificial Sequence
  SAMD9L targeting guide sequence portion
ggaacauguuaucaggaccuu

SEQ ID NO: 7073 - RNA, 21 nt, Artificial Sequence
  SAMD9L targeting guide sequence portion
gggaacauguuaucaggaccu

SEQ ID NO: 7074 - RNA, 21 nt, Artificial Sequence
  SAMD9L targeting guide sequence portion
gguccugauaacauguuccca

SEQ ID NO: 7075 - RNA, 21 nt, Artificial Sequence
  SAMD9L targeting guide sequence portion
guccugauaacauguucccaa

SEQ ID NO: 7076 - RNA, 21 nt, Artificial Sequence
  SAMD9L targeting guide sequence portion
gugcaccuugggaacauguua

SEQ ID NO: 7077 - RNA, 21 nt, Artificial Sequence
  SAMD9L targeting guide sequence portion
guucccaaggugcacagcuug

SEQ ID NO: 7078 - RNA, 21 nt, Artificial Sequence
  SAMD9L targeting guide sequence portion
uaaaaccaagcugugcaccuu

SEQ ID NO: 7079 - RNA, 21 nt, Artificial Sequence
  SAMD9L targeting guide sequence portion
uaacauguucccaaggugcac

SEQ ID NO: 7080 - RNA, 21 nt, Artificial Sequence
  SAMD9L targeting guide sequence portion
uauaaaaccaagcugugcacc

SEQ ID NO: 7081 - RNA, 21 nt, Artificial Sequence
  SAMD9L targeting guide sequence portion
uauauaaaaccaagcugugca

SEQ ID NO: 7082 - RNA, 21 nt, Artificial Sequence
  SAMD9L targeting guide sequence portion
ucagaagguccugauaacaug

SEQ ID NO: 7083 - RNA, 21 nt, Artificial Sequence
  SAMD9L targeting guide sequence portion
ucccaaggugcacagcuuggu

SEQ ID NO: 7084 - RNA, 21 nt, Artificial Sequence
  SAMD9L targeting guide sequence portion
uccugauaacauguucccaag

SEQ ID NO: 7085 - RNA, 21 nt, Artificial Sequence
  SAMD9L targeting guide sequence portion
ugauaacauguucccaaggug

SEQ ID NO: 7086 - RNA, 21 nt, Artificial Sequence
  SAMD9L targeting guide sequence portion
ugcaccuugggaacauguuau

SEQ ID NO: 7087 - RNA, 21 nt, Artificial Sequence
  SAMD9L targeting guide sequence portion
ugggaacauguuaucaggacc

SEQ ID NO: 7088 - RNA, 21 nt, Artificial Sequence
  SAMD9L targeting guide sequence portion
ugugcaccuugggaacauguu

SEQ ID NO: 7089 - RNA, 21 nt, Artificial Sequence
  SAMD9L targeting guide sequence portion
uguucccaaggugcacagcuu

SEQ ID NO: 7090 - RNA, 21 nt, Artificial Sequence
  SAMD9L targeting guide sequence portion
uucccaaggugcacagcuugg

SEQ ID NO: 7091 - RNA, 21 nt, Artificial Sequence
  SAMD9L targeting guide sequence portion
uugggaacauguuaucaggac

SEQ ID NO: 7092 - RNA, 22 nt, Artificial Sequence
  SAMD9L targeting guide sequence portion
aaaaccaagcugugcaccuugg

SEQ ID NO: 7093 - RNA, 22 nt, Artificial Sequence
  SAMD9L targeting guide sequence portion
aaaccaagcugugcaccuuggg

SEQ ID NO: 7094 - RNA, 22 nt, Artificial Sequence
  SAMD9L targeting guide sequence portion
aacauguucccaaggugcacag

SEQ ID NO: 7095 - RNA, 22 nt, Artificial Sequence
  SAMD9L targeting guide sequence portion
aaccaagcugugcaccuuggga

SEQ ID NO: 7096 - RNA, 22 nt, Artificial Sequence
  SAMD9L targeting guide sequence portion
aagcugugcaccuugggaacau

SEQ ID NO: 7097 - RNA, 22 nt, Artificial Sequence
  SAMD9L targeting guide sequence portion
aagguccugauaacauguuccc

SEQ ID NO: 7098 - RNA, 22 nt, Artificial Sequence
  SAMD9L targeting guide sequence portion
acauguucccaaggugcacagc

SEQ ID NO: 7099 - RNA, 22 nt, Artificial Sequence
  SAMD9L targeting guide sequence portion
accaagcugugcaccuugggaa

SEQ ID NO: 7100 - RNA, 22 nt, Artificial Sequence
  SAMD9L targeting guide sequence portion
accuugggaacauguuaucagg

SEQ ID NO: 7101 - RNA, 22 nt, Artificial Sequence
  SAMD9L targeting guide sequence portion
agaagguccugauaacauguuc

SEQ ID NO: 7102 - RNA, 22 nt, Artificial Sequence
  SAMD9L targeting guide sequence portion
agcugugcaccuugggaacaug

SEQ ID NO: 7103 - RNA, 22 nt, Artificial Sequence
  SAMD9L targeting guide sequence portion
agguccugauaacauguuccca

SEQ ID NO: 7104 - RNA, 22 nt, Artificial Sequence
  SAMD9L targeting guide sequence portion
auaaaaccaagcugugcaccuu

SEQ ID NO: 7105 - RNA, 22 nt, Artificial Sequence
  SAMD9L targeting guide sequence portion
auaacauguucccaaggugcac

SEQ ID NO: 7106 - RNA, 22 nt, Artificial Sequence
  SAMD9L targeting guide sequence portion
auauaaaaccaagcugugcacc

SEQ ID NO: 7107 - RNA, 22 nt, Artificial Sequence
  SAMD9L targeting guide sequence portion
auauauaaaaccaagcugugca

SEQ ID NO: 7108 - RNA, 22 nt, Artificial Sequence
  SAMD9L targeting guide sequence portion
auguucccaaggugcacagcuu

SEQ ID NO: 7109 - RNA, 22 nt, Artificial Sequence
  SAMD9L targeting guide sequence portion
caagcugugcaccuugggaaca

SEQ ID NO: 7110 - RNA, 22 nt, Artificial Sequence
  SAMD9L targeting guide sequence portion
caccuugggaacauguuaucag

SEQ ID NO: 7111 - RNA, 22 nt, Artificial Sequence
  SAMD9L targeting guide sequence portion
cagaagguccugauaacauguu

SEQ ID NO: 7112 - RNA, 22 nt, Artificial Sequence
  SAMD9L targeting guide sequence portion
cauguucccaaggugcacagcu

SEQ ID NO: 7113 - RNA, 22 nt, Artificial Sequence
  SAMD9L targeting guide sequence portion
ccaagcugugcaccuugggaac

SEQ ID NO: 7114 - RNA, 22 nt, Artificial Sequence
  SAMD9L targeting guide sequence portion
ccaaggugcacagcuugguuuu

SEQ ID NO: 7115 - RNA, 22 nt, Artificial Sequence
  SAMD9L targeting guide sequence portion
cccaaggugcacagcuugguuu

SEQ ID NO: 7116 - RNA, 22 nt, Artificial Sequence
  SAMD9L targeting guide sequence portion
ccucagaagguccugauaacau

SEQ ID NO: 7117 - RNA, 22 nt, Artificial Sequence
  SAMD9L targeting guide sequence portion
ccugauaacauguucccaaggu

SEQ ID NO: 7118 - RNA, 22 nt, Artificial Sequence
  SAMD9L targeting guide sequence portion
ccuugggaacauguuaucagga

SEQ ID NO: 7119 - RNA, 22 nt, Artificial Sequence
  SAMD9L targeting guide sequence portion
cucagaagguccugauaacaug

SEQ ID NO: 7120 - RNA, 22 nt, Artificial Sequence
  SAMD9L targeting guide sequence portion
cugauaacauguucccaaggug

SEQ ID NO: 7121 - RNA, 22 nt, Artificial Sequence
  SAMD9L targeting guide sequence portion
cugugcaccuugggaacauguu

SEQ ID NO: 7122 - RNA, 22 nt, Artificial Sequence
  SAMD9L targeting guide sequence portion
cuugggaacauguuaucaggac

SEQ ID NO: 7123 - RNA, 22 nt, Artificial Sequence
  SAMD9L targeting guide sequence portion
gaagguccugauaacauguucc

SEQ ID NO: 7124 - RNA, 22 nt, Artificial Sequence
  SAMD9L targeting guide sequence portion
gauaacauguucccaaggugca

SEQ ID NO: 7125 - RNA, 22 nt, Artificial Sequence
  SAMD9L targeting guide sequence portion
gcaccuugggaacauguuauca

SEQ ID NO: 7126 - RNA, 22 nt, Artificial Sequence
  SAMD9L targeting guide sequence portion
gccucagaagguccugauaaca

SEQ ID NO: 7127 - RNA, 22 nt, Artificial Sequence
  SAMD9L targeting guide sequence portion
gcugugcaccuugggaacaugu

SEQ ID NO: 7128 - RNA, 22 nt, Artificial Sequence
  SAMD9L targeting guide sequence portion
ggaacauguuaucaggaccuuc

SEQ ID NO: 7129 - RNA, 22 nt, Artificial Sequence
  SAMD9L targeting guide sequence portion
gggaacauguuaucaggaccuu

SEQ ID NO: 7130 - RNA, 22 nt, Artificial Sequence
  SAMD9L targeting guide sequence portion
gguccugauaacauguucccaa

SEQ ID NO: 7131 - RNA, 22 nt, Artificial Sequence
  SAMD9L targeting guide sequence portion
guccugauaacauguucccaag

SEQ ID NO: 7132 - RNA, 22 nt, Artificial Sequence
  SAMD9L targeting guide sequence portion
gugcaccuugggaacauguuau

SEQ ID NO: 7133 - RNA, 22 nt, Artificial Sequence
  SAMD9L targeting guide sequence portion
guucccaaggugcacagcuugg

SEQ ID NO: 7134 - RNA, 22 nt, Artificial Sequence
  SAMD9L targeting guide sequence portion
uaaaaccaagcugugcaccuug

SEQ ID NO: 7135 - RNA, 22 nt, Artificial Sequence
  SAMD9L targeting guide sequence portion
uaacauguucccaaggugcaca

SEQ ID NO: 7136 - RNA, 22 nt, Artificial Sequence
  SAMD9L targeting guide sequence portion
uauaaaaccaagcugugcaccu

SEQ ID NO: 7137 - RNA, 22 nt, Artificial Sequence
  SAMD9L targeting guide sequence portion
uauauaaaaccaagcugugcac

SEQ ID NO: 7138 - RNA, 22 nt, Artificial Sequence
  SAMD9L targeting guide sequence portion
ucagaagguccugauaacaugu

SEQ ID NO: 7139 - RNA, 22 nt, Artificial Sequence
  SAMD9L targeting guide sequence portion
ucccaaggugcacagcuugguu

SEQ ID NO: 7140 - RNA, 22 nt, Artificial Sequence
  SAMD9L targeting guide sequence portion
uccugauaacauguucccaagg

SEQ ID NO: 7141 - RNA, 22 nt, Artificial Sequence
  SAMD9L targeting guide sequence portion
ugauaacauguucccaaggugc

SEQ ID NO: 7142 - RNA, 22 nt, Artificial Sequence
  SAMD9L targeting guide sequence portion
ugcaccuugggaacauguuauc

SEQ ID NO: 7143 - RNA, 22 nt, Artificial Sequence
  SAMD9L targeting guide sequence portion
ugggaacauguuaucaggaccu

SEQ ID NO: 7144 - RNA, 22 nt, Artificial Sequence
  SAMD9L targeting guide sequence portion
ugugcaccuugggaacauguua

SEQ ID NO: 7145 - RNA, 22 nt, Artificial Sequence
  SAMD9L targeting guide sequence portion
uguucccaaggugcacagcuug

SEQ ID NO: 7146 - RNA, 22 nt, Artificial Sequence
  SAMD9L targeting guide sequence portion
uucccaaggugcacagcuuggu

SEQ ID NO: 7147 - RNA, 22 nt, Artificial Sequence
  SAMD9L targeting guide sequence portion
uugggaacauguuaucaggacc

SEQ ID NO: 7148 - RNA, 20 nt, Artificial Sequence
  SAMD9L targeting guide sequence portion
aacauguucucaaggugcac

SEQ ID NO: 7149 - RNA, 20 nt, Artificial Sequence
  SAMD9L targeting guide sequence portion
aaccaagcugugcaccuuga

SEQ ID NO: 7150 - RNA, 20 nt, Artificial Sequence
  SAMD9L targeting guide sequence portion
aagcugugcaccuugagaac

SEQ ID NO: 7151 - RNA, 20 nt, Artificial Sequence
  SAMD9L targeting guide sequence portion
acauguucucaaggugcaca

SEQ ID NO: 7152 - RNA, 20 nt, Artificial Sequence
  SAMD9L targeting guide sequence portion
accaagcugugcaccuugag

SEQ ID NO: 7153 - RNA, 20 nt, Artificial Sequence
  SAMD9L targeting guide sequence portion
accuugagaacauguuauca

SEQ ID NO: 7154 - RNA, 20 nt, Artificial Sequence
  SAMD9L targeting guide sequence portion
agaacauguuaucaggaccu

SEQ ID NO: 7155 - RNA, 20 nt, Artificial Sequence
  SAMD9L targeting guide sequence portion
agcugugcaccuugagaaca

SEQ ID NO: 7156 - RNA, 20 nt, Artificial Sequence
  SAMD9L targeting guide sequence portion
agguccugauaacauguucu

SEQ ID NO: 7157 - RNA, 20 nt, Artificial Sequence
  SAMD9L targeting guide sequence portion
auaacauguucucaaggugc

SEQ ID NO: 7158 - RNA, 20 nt, Artificial Sequence
  SAMD9L targeting guide sequence portion
auguucucaaggugcacagc

SEQ ID NO: 7159 - RNA, 20 nt, Artificial Sequence
  SAMD9L targeting guide sequence portion
caagcugugcaccuugagaa

SEQ ID NO: 7160 - RNA, 20 nt, Artificial Sequence
  SAMD9L targeting guide sequence portion
caccuugagaacauguuauc

SEQ ID NO: 7161 - RNA, 20 nt, Artificial Sequence
  SAMD9L targeting guide sequence portion
cauguucucaaggugcacag

SEQ ID NO: 7162 - RNA, 20 nt, Artificial Sequence
  SAMD9L targeting guide sequence portion
ccaagcugugcaccuugaga

SEQ ID NO: 7163 - RNA, 20 nt, Artificial Sequence
  SAMD9L targeting guide sequence portion
ccugauaacauguucucaag

SEQ ID NO: 7164 - RNA, 20 nt, Artificial Sequence
  SAMD9L targeting guide sequence portion
ccuugagaacauguuaucag

SEQ ID NO: 7165 - RNA, 20 nt, Artificial Sequence
  SAMD9L targeting guide sequence portion
cucaaggugcacagcuuggu

SEQ ID NO: 7166 - RNA, 20 nt, Artificial Sequence
  SAMD9L targeting guide sequence portion
cugauaacauguucucaagg

SEQ ID NO: 7167 - RNA, 20 nt, Artificial Sequence
  SAMD9L targeting guide sequence portion
cugugcaccuugagaacaug

SEQ ID NO: 7168 - RNA, 20 nt, Artificial Sequence
  SAMD9L targeting guide sequence portion
cuugagaacauguuaucagg

SEQ ID NO: 7169 - RNA, 20 nt, Artificial Sequence
  SAMD9L targeting guide sequence portion
gagaacauguuaucaggacc

SEQ ID NO: 7170 - RNA, 20 nt, Artificial Sequence
  SAMD9L targeting guide sequence portion
gauaacauguucucaaggug

SEQ ID NO: 7171 - RNA, 20 nt, Artificial Sequence
  SAMD9L targeting guide sequence portion
gcaccuugagaacauguuau

SEQ ID NO: 7172 - RNA, 20 nt, Artificial Sequence
  SAMD9L targeting guide sequence portion
gcugugcaccuugagaacau

SEQ ID NO: 7173 - RNA, 20 nt, Artificial Sequence
  SAMD9L targeting guide sequence portion
gguccugauaacauguucuc

SEQ ID NO: 7174 - RNA, 20 nt, Artificial Sequence
  SAMD9L targeting guide sequence portion
guccugauaacauguucuca

SEQ ID NO: 7175 - RNA, 20 nt, Artificial Sequence
  SAMD9L targeting guide sequence portion
gugcaccuugagaacauguu

SEQ ID NO: 7176 - RNA, 20 nt, Artificial Sequence
  SAMD9L targeting guide sequence portion
guucucaaggugcacagcuu

SEQ ID NO: 7177 - RNA, 20 nt, Artificial Sequence
  SAMD9L targeting guide sequence portion
uaacauguucucaaggugca

SEQ ID NO: 7178 - RNA, 20 nt, Artificial Sequence
  SAMD9L targeting guide sequence portion
ucaaggugcacagcuugguu

SEQ ID NO: 7179 - RNA, 20 nt, Artificial Sequence
  SAMD9L targeting guide sequence portion
uccugauaacauguucucaa

SEQ ID NO: 7180 - RNA, 20 nt, Artificial Sequence
  SAMD9L targeting guide sequence portion
ucucaaggugcacagcuugg

SEQ ID NO: 7181 - RNA, 20 nt, Artificial Sequence
  SAMD9L targeting guide sequence portion
ugagaacauguuaucaggac

SEQ ID NO: 7182 - RNA, 20 nt, Artificial Sequence
  SAMD9L targeting guide sequence portion
ugauaacauguucucaaggu

SEQ ID NO: 7183 - RNA, 20 nt, Artificial Sequence
  SAMD9L targeting guide sequence portion
ugcaccuugagaacauguua

SEQ ID NO: 7184 - RNA, 20 nt, Artificial Sequence
  SAMD9L targeting guide sequence portion
ugugcaccuugagaacaugu

SEQ ID NO: 7185 - RNA, 20 nt, Artificial Sequence
  SAMD9L targeting guide sequence portion
uguucucaaggugcacagcu

SEQ ID NO: 7186 - RNA, 20 nt, Artificial Sequence
  SAMD9L targeting guide sequence portion
uucucaaggugcacagcuug

SEQ ID NO: 7187 - RNA, 20 nt, Artificial Sequence
  SAMD9L targeting guide sequence portion
uugagaacauguuaucagga

SEQ ID NO: 7188 - RNA, 21 nt, Artificial Sequence
  SAMD9L targeting guide sequence portion
aaaccaagcugugcaccuuga

SEQ ID NO: 7189 - RNA, 21 nt, Artificial Sequence
  SAMD9L targeting guide sequence portion
aacauguucucaaggugcaca

SEQ ID NO: 7190 - RNA, 21 nt, Artificial Sequence
  SAMD9L targeting guide sequence portion
aaccaagcugugcaccuugag

SEQ ID NO: 7191 - RNA, 21 nt, Artificial Sequence
  SAMD9L targeting guide sequence portion
aagcugugcaccuugagaaca

SEQ ID NO: 7192 - RNA, 21 nt, Artificial Sequence
  SAMD9L targeting guide sequence portion
aagguccugauaacauguucu

SEQ ID NO: 7193 - RNA, 21 nt, Artificial Sequence
  SAMD9L targeting guide sequence portion
acauguucucaaggugcacag

SEQ ID NO: 7194 - RNA, 21 nt, Artificial Sequence
  SAMD9L targeting guide sequence portion
accaagcugugcaccuugaga

SEQ ID NO: 7195 - RNA, 21 nt, Artificial Sequence
  SAMD9L targeting guide sequence portion
accuugagaacauguuaucag

SEQ ID NO: 7196 - RNA, 21 nt, Artificial Sequence
  SAMD9L targeting guide sequence portion
agaacauguuaucaggaccuu

SEQ ID NO: 7197 - RNA, 21 nt, Artificial Sequence
  SAMD9L targeting guide sequence portion
agcugugcaccuugagaacau

SEQ ID NO: 7198 - RNA, 21 nt, Artificial Sequence
  SAMD9L targeting guide sequence portion
agguccugauaacauguucuc

SEQ ID NO: 7199 - RNA, 21 nt, Artificial Sequence
  SAMD9L targeting guide sequence portion
auaacauguucucaaggugca

SEQ ID NO: 7200 - RNA, 21 nt, Artificial Sequence
  SAMD9L targeting guide sequence portion
auguucucaaggugcacagcu

SEQ ID NO: 7201 - RNA, 21 nt, Artificial Sequence
  SAMD9L targeting guide sequence portion
caagcugugcaccuugagaac

SEQ ID NO: 7202 - RNA, 21 nt, Artificial Sequence
  SAMD9L targeting guide sequence portion
caccuugagaacauguuauca

SEQ ID NO: 7203 - RNA, 21 nt, Artificial Sequence
  SAMD9L targeting guide sequence portion
cauguucucaaggugcacagc

SEQ ID NO: 7204 - RNA, 21 nt, Artificial Sequence
  SAMD9L targeting guide sequence portion
ccaagcugugcaccuugagaa

SEQ ID NO: 7205 - RNA, 21 nt, Artificial Sequence
  SAMD9L targeting guide sequence portion
ccugauaacauguucucaagg

SEQ ID NO: 7206 - RNA, 21 nt, Artificial Sequence
  SAMD9L targeting guide sequence portion
ccuugagaacauguuaucagg

SEQ ID NO: 7207 - RNA, 21 nt, Artificial Sequence
  SAMD9L targeting guide sequence portion
cucaaggugcacagcuugguu

SEQ ID NO: 7208 - RNA, 21 nt, Artificial Sequence
  SAMD9L targeting guide sequence portion
cugauaacauguucucaaggu

SEQ ID NO: 7209 - RNA, 21 nt, Artificial Sequence
  SAMD9L targeting guide sequence portion
cugugcaccuugagaacaugu

SEQ ID NO: 7210 - RNA, 21 nt, Artificial Sequence
  SAMD9L targeting guide sequence portion
cuugagaacauguuaucagga

SEQ ID NO: 7211 - RNA, 21 nt, Artificial Sequence
  SAMD9L targeting guide sequence portion
gagaacauguuaucaggaccu

SEQ ID NO: 7212 - RNA, 21 nt, Artificial Sequence
  SAMD9L targeting guide sequence portion
gauaacauguucucaaggugc

SEQ ID NO: 7213 - RNA, 21 nt, Artificial Sequence
  SAMD9L targeting guide sequence portion
gcaccuugagaacauguuauc

SEQ ID NO: 7214 - RNA, 21 nt, Artificial Sequence
  SAMD9L targeting guide sequence portion
gcugugcaccuugagaacaug

SEQ ID NO: 7215 - RNA, 21 nt, Artificial Sequence
  SAMD9L targeting guide sequence portion
gguccugauaacauguucuca

SEQ ID NO: 7216 - RNA, 21 nt, Artificial Sequence
  SAMD9L targeting guide sequence portion
guccugauaacauguucucaa

SEQ ID NO: 7217 - RNA, 21 nt, Artificial Sequence
  SAMD9L targeting guide sequence portion
gugcaccuugagaacauguua

SEQ ID NO: 7218 - RNA, 21 nt, Artificial Sequence
  SAMD9L targeting guide sequence portion
guucucaaggugcacagcuug

SEQ ID NO: 7219 - RNA, 21 nt, Artificial Sequence
  SAMD9L targeting guide sequence portion
uaacauguucucaaggugcac

SEQ ID NO: 7220 - RNA, 21 nt, Artificial Sequence
  SAMD9L targeting guide sequence portion
ucaaggugcacagcuugguuu

SEQ ID NO: 7221 - RNA, 21 nt, Artificial Sequence
  SAMD9L targeting guide sequence portion
uccugauaacauguucucaag

SEQ ID NO: 7222 - RNA, 21 nt, Artificial Sequence
  SAMD9L targeting guide sequence portion
ucucaaggugcacagcuuggu

SEQ ID NO: 7223 - RNA, 21 nt, Artificial Sequence
  SAMD9L targeting guide sequence portion
ugagaacauguuaucaggacc

SEQ ID NO: 7224 - RNA, 21 nt, Artificial Sequence
  SAMD9L targeting guide sequence portion
ugauaacauguucucaaggug

SEQ ID NO: 7225 - RNA, 21 nt, Artificial Sequence
  SAMD9L targeting guide sequence portion
ugcaccuugagaacauguuau

SEQ ID NO: 7226 - RNA, 21 nt, Artificial Sequence
  SAMD9L targeting guide sequence portion
ugugcaccuugagaacauguu

SEQ ID NO: 7227 - RNA, 21 nt, Artificial Sequence
  SAMD9L targeting guide sequence portion
uguucucaaggugcacagcuu

SEQ ID NO: 7228 - RNA, 21 nt, Artificial Sequence
  SAMD9L targeting guide sequence portion
uucucaaggugcacagcuugg

SEQ ID NO: 7229 - RNA, 21 nt, Artificial Sequence
  SAMD9L targeting guide sequence portion
uugagaacauguuaucaggac

SEQ ID NO: 7230 - RNA, 22 nt, Artificial Sequence
  SAMD9L targeting guide sequence portion
aaaaccaagcugugcaccuuga

SEQ ID NO: 7231 - RNA, 22 nt, Artificial Sequence
  SAMD9L targeting guide sequence portion
aaaccaagcugugcaccuugag

SEQ ID NO: 7232 - RNA, 22 nt, Artificial Sequence
  SAMD9L targeting guide sequence portion
aacauguucucaaggugcacag

SEQ ID NO: 7233 - RNA, 22 nt, Artificial Sequence
  SAMD9L targeting guide sequence portion
aaccaagcugugcaccuugaga

SEQ ID NO: 7234 - RNA, 22 nt, Artificial Sequence
  SAMD9L targeting guide sequence portion
aagcugugcaccuugagaacau

SEQ ID NO: 7235 - RNA, 22 nt, Artificial Sequence
  SAMD9L targeting guide sequence portion
aagguccugauaacauguucuc

SEQ ID NO: 7236 - RNA, 22 nt, Artificial Sequence
  SAMD9L targeting guide sequence portion
acauguucucaaggugcacagc

SEQ ID NO: 7237 - RNA, 22 nt, Artificial Sequence
  SAMD9L targeting guide sequence portion
accaagcugugcaccuugagaa

SEQ ID NO: 7238 - RNA, 22 nt, Artificial Sequence
  SAMD9L targeting guide sequence portion
accuugagaacauguuaucagg

SEQ ID NO: 7239 - RNA, 22 nt, Artificial Sequence
  SAMD9L targeting guide sequence portion
agaacauguuaucaggaccuuc

SEQ ID NO: 7240 - RNA, 22 nt, Artificial Sequence
  SAMD9L targeting guide sequence portion
agcugugcaccuugagaacaug

SEQ ID NO: 7241 - RNA, 22 nt, Artificial Sequence
  SAMD9L targeting guide sequence portion
agguccugauaacauguucuca

SEQ ID NO: 7242 - RNA, 22 nt, Artificial Sequence
  SAMD9L targeting guide sequence portion
auaacauguucucaaggugcac

SEQ ID NO: 7243 - RNA, 22 nt, Artificial Sequence
  SAMD9L targeting guide sequence portion
auguucucaaggugcacagcuu

SEQ ID NO: 7244 - RNA, 22 nt, Artificial Sequence
  SAMD9L targeting guide sequence portion
caagcugugcaccuugagaaca

SEQ ID NO: 7245 - RNA, 22 nt, Artificial Sequence
  SAMD9L targeting guide sequence portion
caccuugagaacauguuaucag

SEQ ID NO: 7246 - RNA, 22 nt, Artificial Sequence
  SAMD9L targeting guide sequence portion
cauguucucaaggugcacagcu

SEQ ID NO: 7247 - RNA, 22 nt, Artificial Sequence
  SAMD9L targeting guide sequence portion
ccaagcugugcaccuugagaac

SEQ ID NO: 7248 - RNA, 22 nt, Artificial Sequence
  SAMD9L targeting guide sequence portion
ccugauaacauguucucaaggu

SEQ ID NO: 7249 - RNA, 22 nt, Artificial Sequence
  SAMD9L targeting guide sequence portion
ccuugagaacauguuaucagga

SEQ ID NO: 7250 - RNA, 22 nt, Artificial Sequence
  SAMD9L targeting guide sequence portion
cucaaggugcacagcuugguuu

SEQ ID NO: 7251 - RNA, 22 nt, Artificial Sequence
  SAMD9L targeting guide sequence portion
cugauaacauguucucaaggug

SEQ ID NO: 7252 - RNA, 22 nt, Artificial Sequence
  SAMD9L targeting guide sequence portion
cugugcaccuugagaacauguu

SEQ ID NO: 7253 - RNA, 22 nt, Artificial Sequence
  SAMD9L targeting guide sequence portion
cuugagaacauguuaucaggac

SEQ ID NO: 7254 - RNA, 22 nt, Artificial Sequence
  SAMD9L targeting guide sequence portion
gaagguccugauaacauguucu

SEQ ID NO: 7255 - RNA, 22 nt, Artificial Sequence
  SAMD9L targeting guide sequence portion
gagaacauguuaucaggaccuu

SEQ ID NO: 7256 - RNA, 22 nt, Artificial Sequence
  SAMD9L targeting guide sequence portion
gauaacauguucucaaggugca

SEQ ID NO: 7257 - RNA, 22 nt, Artificial Sequence
  SAMD9L targeting guide sequence portion
gcaccuugagaacauguuauca

SEQ ID NO: 7258 - RNA, 22 nt, Artificial Sequence
  SAMD9L targeting guide sequence portion
gcugugcaccuugagaacaugu

SEQ ID NO: 7259 - RNA, 22 nt, Artificial Sequence
  SAMD9L targeting guide sequence portion
gguccugauaacauguucucaa

SEQ ID NO: 7260 - RNA, 22 nt, Artificial Sequence
  SAMD9L targeting guide sequence portion
guccugauaacauguucucaag

SEQ ID NO: 7261 - RNA, 22 nt, Artificial Sequence
  SAMD9L targeting guide sequence portion
gugcaccuugagaacauguuau

SEQ ID NO: 7262 - RNA, 22 nt, Artificial Sequence
  SAMD9L targeting guide sequence portion
guucucaaggugcacagcuugg

SEQ ID NO: 7263 - RNA, 22 nt, Artificial Sequence
  SAMD9L targeting guide sequence portion
uaacauguucucaaggugcaca

SEQ ID NO: 7264 - RNA, 22 nt, Artificial Sequence
  SAMD9L targeting guide sequence portion
ucaaggugcacagcuugguuuu

SEQ ID NO: 7265 - RNA, 22 nt, Artificial Sequence
  SAMD9L targeting guide sequence portion
uccugauaacauguucucaagg

SEQ ID NO: 7266 - RNA, 22 nt, Artificial Sequence
  SAMD9L targeting guide sequence portion
ucucaaggugcacagcuugguu

SEQ ID NO: 7267 - RNA, 22 nt, Artificial Sequence
  SAMD9L targeting guide sequence portion
ugagaacauguuaucaggaccu

SEQ ID NO: 7268 - RNA, 22 nt, Artificial Sequence
  SAMD9L targeting guide sequence portion
ugauaacauguucucaaggugc

SEQ ID NO: 7269 - RNA, 22 nt, Artificial Sequence
  SAMD9L targeting guide sequence portion
ugcaccuugagaacauguuauc

SEQ ID NO: 7270 - RNA, 22 nt, Artificial Sequence
  SAMD9L targeting guide sequence portion
ugugcaccuugagaacauguua

SEQ ID NO: 7271 - RNA, 22 nt, Artificial Sequence
  SAMD9L targeting guide sequence portion
uguucucaaggugcacagcuug

SEQ ID NO: 7272 - RNA, 22 nt, Artificial Sequence
  SAMD9L targeting guide sequence portion
uucucaaggugcacagcuuggu

SEQ ID NO: 7273 - RNA, 22 nt, Artificial Sequence
  SAMD9L targeting guide sequence portion
uugagaacauguuaucaggacc

SEQ ID NO: 7274 - RNA, 20 nt, Artificial Sequence
  SAMD9L targeting guide sequence portion
aaauuccaagcucuagaaug

SEQ ID NO: 7275 - RNA, 20 nt, Artificial Sequence
  SAMD9L targeting guide sequence portion
aagcagcauucuagagcuug

SEQ ID NO: 7276 - RNA, 20 nt, Artificial Sequence
  SAMD9L targeting guide sequence portion
aagcucuagaaugcugcuug

SEQ ID NO: 7277 - RNA, 20 nt, Artificial Sequence
  SAMD9L targeting guide sequence portion
aaugcguaguucuuaaauuc

SEQ ID NO: 7278 - RNA, 20 nt, Artificial Sequence
  SAMD9L targeting guide sequence portion
aauuccaagcucuagaaugc

SEQ ID NO: 7279 - RNA, 20 nt, Artificial Sequence
  SAMD9L targeting guide sequence portion
acagucucaagcagcauucu

SEQ ID NO: 7280 - RNA, 20 nt, Artificial Sequence
  SAMD9L targeting guide sequence portion
agagcuuggaauuuaagaac

SEQ ID NO: 7281 - RNA, 20 nt, Artificial Sequence
  SAMD9L targeting guide sequence portion
agcagcauucuagagcuugg

SEQ ID NO: 7282 - RNA, 20 nt, Artificial Sequence
  SAMD9L targeting guide sequence portion
agcauucuagagcuuggaau

SEQ ID NO: 7283 - RNA, 20 nt, Artificial Sequence
  SAMD9L targeting guide sequence portion
agcucuagaaugcugcuuga

SEQ ID NO: 7284 - RNA, 20 nt, Artificial Sequence
  SAMD9L targeting guide sequence portion
agcuuggaauuuaagaacua

SEQ ID NO: 7285 - RNA, 20 nt, Artificial Sequence
  SAMD9L targeting guide sequence portion
agucucaagcagcauucuag

SEQ ID NO: 7286 - RNA, 20 nt, Artificial Sequence
  SAMD9L targeting guide sequence portion
aguucuuaaauuccaagcuc

SEQ ID NO: 7287 - RNA, 20 nt, Artificial Sequence
  SAMD9L targeting guide sequence portion
augcguaguucuuaaauucc

SEQ ID NO: 7288 - RNA, 20 nt, Artificial Sequence
  SAMD9L targeting guide sequence portion
auuccaagcucuagaaugcu

SEQ ID NO: 7289 - RNA, 20 nt, Artificial Sequence
  SAMD9L targeting guide sequence portion
auucuagagcuuggaauuua

SEQ ID NO: 7290 - RNA, 20 nt, Artificial Sequence
  SAMD9L targeting guide sequence portion
caagcagcauucuagagcuu

SEQ ID NO: 7291 - RNA, 20 nt, Artificial Sequence
  SAMD9L targeting guide sequence portion
caagcucuagaaugcugcuu

SEQ ID NO: 7292 - RNA, 20 nt, Artificial Sequence
  SAMD9L targeting guide sequence portion
caaugcguaguucuuaaauu

SEQ ID NO: 7293 - RNA, 20 nt, Artificial Sequence
  SAMD9L targeting guide sequence portion
cagcauucuagagcuuggaa

SEQ ID NO: 7294 - RNA, 20 nt, Artificial Sequence
  SAMD9L targeting guide sequence portion
cagucucaagcagcauucua

SEQ ID NO: 7295 - RNA, 20 nt, Artificial Sequence
  SAMD9L targeting guide sequence portion
cauucuagagcuuggaauuu

SEQ ID NO: 7296 - RNA, 20 nt, Artificial Sequence
  SAMD9L targeting guide sequence portion
ccaagcucuagaaugcugcu

SEQ ID NO: 7297 - RNA, 20 nt, Artificial Sequence
  SAMD9L targeting guide sequence portion
cguaguucuuaaauuccaag

SEQ ID NO: 7298 - RNA, 20 nt, Artificial Sequence
  SAMD9L targeting guide sequence portion
cuagagcuuggaauuuaaga

SEQ ID NO: 7299 - RNA, 20 nt, Artificial Sequence
  SAMD9L targeting guide sequence portion
cucaagcagcauucuagagc

SEQ ID NO: 7300 - RNA, 20 nt, Artificial Sequence
  SAMD9L targeting guide sequence portion
cuuaaauuccaagcucuaga

SEQ ID NO: 7301 - RNA, 20 nt, Artificial Sequence
  SAMD9L targeting guide sequence portion
cuuggaauuuaagaacuacg

SEQ ID NO: 7302 - RNA, 20 nt, Artificial Sequence
  SAMD9L targeting guide sequence portion
gagcuuggaauuuaagaacu

SEQ ID NO: 7303 - RNA, 20 nt, Artificial Sequence
  SAMD9L targeting guide sequence portion
gcaaugcguaguucuuaaau

SEQ ID NO: 7304 - RNA, 20 nt, Artificial Sequence
  SAMD9L targeting guide sequence portion
gcagcauucuagagcuugga

SEQ ID NO: 7305 - RNA, 20 nt, Artificial Sequence
  SAMD9L targeting guide sequence portion
gcauucuagagcuuggaauu

SEQ ID NO: 7306 - RNA, 20 nt, Artificial Sequence
  SAMD9L targeting guide sequence portion
gcguaguucuuaaauuccaa

SEQ ID NO: 7307 - RNA, 20 nt, Artificial Sequence
  SAMD9L targeting guide sequence portion
gcuuggaauuuaagaacuac

SEQ ID NO: 7308 - RNA, 20 nt, Artificial Sequence
  SAMD9L targeting guide sequence portion
ggcaaugcguaguucuuaaa

SEQ ID NO: 7309 - RNA, 20 nt, Artificial Sequence
  SAMD9L targeting guide sequence portion
guaguucuuaaauuccaagc

SEQ ID NO: 7310 - RNA, 20 nt, Artificial Sequence
  SAMD9L targeting guide sequence portion
gucucaagcagcauucuaga

SEQ ID NO: 7311 - RNA, 20 nt, Artificial Sequence
  SAMD9L targeting guide sequence portion
guucuuaaauuccaagcucu

SEQ ID NO: 7312 - RNA, 20 nt, Artificial Sequence
  SAMD9L targeting guide sequence portion
uaaauuccaagcucuagaau

SEQ ID NO: 7313 - RNA, 20 nt, Artificial Sequence
  SAMD9L targeting guide sequence portion
uagagcuuggaauuuaagaa

SEQ ID NO: 7314 - RNA, 20 nt, Artificial Sequence
  SAMD9L targeting guide sequence portion
uaguucuuaaauuccaagcu

SEQ ID NO: 7315 - RNA, 20 nt, Artificial Sequence
  SAMD9L targeting guide sequence portion
ucaagcagcauucuagagcu

SEQ ID NO: 7316 - RNA, 20 nt, Artificial Sequence
  SAMD9L targeting guide sequence portion
uccaagcucuagaaugcugc

SEQ ID NO: 7317 - RNA, 20 nt, Artificial Sequence
  SAMD9L targeting guide sequence portion
ucuagagcuuggaauuuaag

SEQ ID NO: 7318 - RNA, 20 nt, Artificial Sequence
  SAMD9L targeting guide sequence portion
ucucaagcagcauucuagag

SEQ ID NO: 7319 - RNA, 20 nt, Artificial Sequence
  SAMD9L targeting guide sequence portion
ucuuaaauuccaagcucuag

SEQ ID NO: 7320 - RNA, 20 nt, Artificial Sequence
  SAMD9L targeting guide sequence portion
ugcguaguucuuaaauucca

SEQ ID NO: 7321 - RNA, 20 nt, Artificial Sequence
  SAMD9L targeting guide sequence portion
uuaaauuccaagcucuagaa

SEQ ID NO: 7322 - RNA, 20 nt, Artificial Sequence
  SAMD9L targeting guide sequence portion
uuccaagcucuagaaugcug

SEQ ID NO: 7323 - RNA, 20 nt, Artificial Sequence
  SAMD9L targeting guide sequence portion
uucuagagcuuggaauuuaa

SEQ ID NO: 7324 - RNA, 20 nt, Artificial Sequence
  SAMD9L targeting guide sequence portion
uucuuaaauuccaagcucua

SEQ ID NO: 7325 - RNA, 20 nt, Artificial Sequence
  SAMD9L targeting guide sequence portion
uuggaauuuaagaacuacgc

SEQ ID NO: 7326 - RNA, 21 nt, Artificial Sequence
  SAMD9L targeting guide sequence portion
aaauuccaagcucuagaaugc

SEQ ID NO: 7327 - RNA, 21 nt, Artificial Sequence
  SAMD9L targeting guide sequence portion
aacagucucaagcagcauucu

SEQ ID NO: 7328 - RNA, 21 nt, Artificial Sequence
  SAMD9L targeting guide sequence portion
aagcagcauucuagagcuugg

SEQ ID NO: 7329 - RNA, 21 nt, Artificial Sequence
  SAMD9L targeting guide sequence portion
aagcucuagaaugcugcuuga

SEQ ID NO: 7330 - RNA, 21 nt, Artificial Sequence
  SAMD9L targeting guide sequence portion
aaugcguaguucuuaaauucc

SEQ ID NO: 7331 - RNA, 21 nt, Artificial Sequence
  SAMD9L targeting guide sequence portion
aauuccaagcucuagaaugcu

SEQ ID NO: 7332 - RNA, 21 nt, Artificial Sequence
  SAMD9L targeting guide sequence portion
acagucucaagcagcauucua

SEQ ID NO: 7333 - RNA, 21 nt, Artificial Sequence
  SAMD9L targeting guide sequence portion
agagcuuggaauuuaagaacu

SEQ ID NO: 7334 - RNA, 21 nt, Artificial Sequence
  SAMD9L targeting guide sequence portion
agcagcauucuagagcuugga

SEQ ID NO: 7335 - RNA, 21 nt, Artificial Sequence
  SAMD9L targeting guide sequence portion
agcauucuagagcuuggaauu

SEQ ID NO: 7336 - RNA, 21 nt, Artificial Sequence
  SAMD9L targeting guide sequence portion
agcucuagaaugcugcuugag

SEQ ID NO: 7337 - RNA, 21 nt, Artificial Sequence
  SAMD9L targeting guide sequence portion
agcuuggaauuuaagaacuac

SEQ ID NO: 7338 - RNA, 21 nt, Artificial Sequence
  SAMD9L targeting guide sequence portion
aggcaaugcguaguucuuaaa

SEQ ID NO: 7339 - RNA, 21 nt, Artificial Sequence
  SAMD9L targeting guide sequence portion
agucucaagcagcauucuaga

SEQ ID NO: 7340 - RNA, 21 nt, Artificial Sequence
  SAMD9L targeting guide sequence portion
aguucuuaaauuccaagcucu

SEQ ID NO: 7341 - RNA, 21 nt, Artificial Sequence
  SAMD9L targeting guide sequence portion
augcguaguucuuaaauucca

SEQ ID NO: 7342 - RNA, 21 nt, Artificial Sequence
  SAMD9L targeting guide sequence portion
auuccaagcucuagaaugcug

SEQ ID NO: 7343 - RNA, 21 nt, Artificial Sequence
  SAMD9L targeting guide sequence portion
auucuagagcuuggaauuuaa

SEQ ID NO: 7344 - RNA, 21 nt, Artificial Sequence
  SAMD9L targeting guide sequence portion
caagcagcauucuagagcuug

SEQ ID NO: 7345 - RNA, 21 nt, Artificial Sequence
  SAMD9L targeting guide sequence portion
caagcucuagaaugcugcuug

SEQ ID NO: 7346 - RNA, 21 nt, Artificial Sequence
  SAMD9L targeting guide sequence portion
caaugcguaguucuuaaauuc

SEQ ID NO: 7347 - RNA, 21 nt, Artificial Sequence
  SAMD9L targeting guide sequence portion
cagcauucuagagcuuggaau

SEQ ID NO: 7348 - RNA, 21 nt, Artificial Sequence
  SAMD9L targeting guide sequence portion
cagucucaagcagcauucuag

SEQ ID NO: 7349 - RNA, 21 nt, Artificial Sequence
  SAMD9L targeting guide sequence portion
cauucuagagcuuggaauuua

SEQ ID NO: 7350 - RNA, 21 nt, Artificial Sequence
  SAMD9L targeting guide sequence portion
ccaagcucuagaaugcugcuu

SEQ ID NO: 7351 - RNA, 21 nt, Artificial Sequence
  SAMD9L targeting guide sequence portion
cguaguucuuaaauuccaagc

SEQ ID NO: 7352 - RNA, 21 nt, Artificial Sequence
  SAMD9L targeting guide sequence portion
cuagagcuuggaauuuaagaa

SEQ ID NO: 7353 - RNA, 21 nt, Artificial Sequence
  SAMD9L targeting guide sequence portion
cucaagcagcauucuagagcu

SEQ ID NO: 7354 - RNA, 21 nt, Artificial Sequence
  SAMD9L targeting guide sequence portion
cuuaaauuccaagcucuagaa

SEQ ID NO: 7355 - RNA, 21 nt, Artificial Sequence
  SAMD9L targeting guide sequence portion
cuuggaauuuaagaacuacgc

SEQ ID NO: 7356 - RNA, 21 nt, Artificial Sequence
  SAMD9L targeting guide sequence portion
gagcuuggaauuuaagaacua

SEQ ID NO: 7357 - RNA, 21 nt, Artificial Sequence
  SAMD9L targeting guide sequence portion
gcaaugcguaguucuuaaauu

SEQ ID NO: 7358 - RNA, 21 nt, Artificial Sequence
  SAMD9L targeting guide sequence portion
gcagcauucuagagcuuggaa

SEQ ID NO: 7359 - RNA, 21 nt, Artificial Sequence
  SAMD9L targeting guide sequence portion
gcauucuagagcuuggaauuu

SEQ ID NO: 7360 - RNA, 21 nt, Artificial Sequence
  SAMD9L targeting guide sequence portion
gcguaguucuuaaauuccaag

SEQ ID NO: 7361 - RNA, 21 nt, Artificial Sequence
  SAMD9L targeting guide sequence portion
gcuuggaauuuaagaacuacg

SEQ ID NO: 7362 - RNA, 21 nt, Artificial Sequence
  SAMD9L targeting guide sequence portion
ggcaaugcguaguucuuaaau

SEQ ID NO: 7363 - RNA, 21 nt, Artificial Sequence
  SAMD9L targeting guide sequence portion
guaguucuuaaauuccaagcu

SEQ ID NO: 7364 - RNA, 21 nt, Artificial Sequence
  SAMD9L targeting guide sequence portion
gucucaagcagcauucuagag

SEQ ID NO: 7365 - RNA, 21 nt, Artificial Sequence
  SAMD9L targeting guide sequence portion
guucuuaaauuccaagcucua

SEQ ID NO: 7366 - RNA, 21 nt, Artificial Sequence
  SAMD9L targeting guide sequence portion
uaaauuccaagcucuagaaug

SEQ ID NO: 7367 - RNA, 21 nt, Artificial Sequence
  SAMD9L targeting guide sequence portion
uagagcuuggaauuuaagaac

SEQ ID NO: 7368 - RNA, 21 nt, Artificial Sequence
  SAMD9L targeting guide sequence portion
uaguucuuaaauuccaagcuc

SEQ ID NO: 7369 - RNA, 21 nt, Artificial Sequence
  SAMD9L targeting guide sequence portion
ucaagcagcauucuagagcuu

SEQ ID NO: 7370 - RNA, 21 nt, Artificial Sequence
  SAMD9L targeting guide sequence portion
uccaagcucuagaaugcugcu

SEQ ID NO: 7371 - RNA, 21 nt, Artificial Sequence
  SAMD9L targeting guide sequence portion
ucuagagcuuggaauuuaaga

SEQ ID NO: 7372 - RNA, 21 nt, Artificial Sequence
  SAMD9L targeting guide sequence portion
ucucaagcagcauucuagagc

SEQ ID NO: 7373 - RNA, 21 nt, Artificial Sequence
  SAMD9L targeting guide sequence portion
ucuuaaauuccaagcucuaga

SEQ ID NO: 7374 - RNA, 21 nt, Artificial Sequence
  SAMD9L targeting guide sequence portion
ugcguaguucuuaaauuccaa

SEQ ID NO: 7375 - RNA, 21 nt, Artificial Sequence
  SAMD9L targeting guide sequence portion
uuaaauuccaagcucuagaau

SEQ ID NO: 7376 - RNA, 21 nt, Artificial Sequence
  SAMD9L targeting guide sequence portion
uuccaagcucuagaaugcugc

SEQ ID NO: 7377 - RNA, 21 nt, Artificial Sequence
  SAMD9L targeting guide sequence portion
uucuagagcuuggaauuuaag

SEQ ID NO: 7378 - RNA, 21 nt, Artificial Sequence
  SAMD9L targeting guide sequence portion
uucuuaaauuccaagcucuag

SEQ ID NO: 7379 - RNA, 21 nt, Artificial Sequence
  SAMD9L targeting guide sequence portion
uuggaauuuaagaacuacgca

SEQ ID NO: 7380 - RNA, 22 nt, Artificial Sequence
  SAMD9L targeting guide sequence portion
aaauuccaagcucuagaaugcu

SEQ ID NO: 7381 - RNA, 22 nt, Artificial Sequence
  SAMD9L targeting guide sequence portion
aacagucucaagcagcauucua

SEQ ID NO: 7382 - RNA, 22 nt, Artificial Sequence
  SAMD9L targeting guide sequence portion
aagcagcauucuagagcuugga

SEQ ID NO: 7383 - RNA, 22 nt, Artificial Sequence
  SAMD9L targeting guide sequence portion
aagcucuagaaugcugcuugag

SEQ ID NO: 7384 - RNA, 22 nt, Artificial Sequence
  SAMD9L targeting guide sequence portion
aaugcguaguucuuaaauucca

SEQ ID NO: 7385 - RNA, 22 nt, Artificial Sequence
  SAMD9L targeting guide sequence portion
aauuccaagcucuagaaugcug

SEQ ID NO: 7386 - RNA, 22 nt, Artificial Sequence
  SAMD9L targeting guide sequence portion
acagucucaagcagcauucuag

SEQ ID NO: 7387 - RNA, 22 nt, Artificial Sequence
  SAMD9L targeting guide sequence portion
agagcuuggaauuuaagaacua

SEQ ID NO: 7388 - RNA, 22 nt, Artificial Sequence
  SAMD9L targeting guide sequence portion
agcagcauucuagagcuuggaa

SEQ ID NO: 7389 - RNA, 22 nt, Artificial Sequence
  SAMD9L targeting guide sequence portion
agcauucuagagcuuggaauuu

SEQ ID NO: 7390 - RNA, 22 nt, Artificial Sequence
  SAMD9L targeting guide sequence portion
agcucuagaaugcugcuugaga

SEQ ID NO: 7391 - RNA, 22 nt, Artificial Sequence
  SAMD9L targeting guide sequence portion
agcuuggaauuuaagaacuacg

SEQ ID NO: 7392 - RNA, 22 nt, Artificial Sequence
  SAMD9L targeting guide sequence portion
aggcaaugcguaguucuuaaau

SEQ ID NO: 7393 - RNA, 22 nt, Artificial Sequence
  SAMD9L targeting guide sequence portion
agucucaagcagcauucuagag

SEQ ID NO: 7394 - RNA, 22 nt, Artificial Sequence
  SAMD9L targeting guide sequence portion
aguucuuaaauuccaagcucua

SEQ ID NO: 7395 - RNA, 22 nt, Artificial Sequence
  SAMD9L targeting guide sequence portion
augcguaguucuuaaauuccaa

SEQ ID NO: 7396 - RNA, 22 nt, Artificial Sequence
  SAMD9L targeting guide sequence portion
auuccaagcucuagaaugcugc

SEQ ID NO: 7397 - RNA, 22 nt, Artificial Sequence
  SAMD9L targeting guide sequence portion
auucuagagcuuggaauuuaag

SEQ ID NO: 7398 - RNA, 22 nt, Artificial Sequence
  SAMD9L targeting guide sequence portion
caagcagcauucuagagcuugg

SEQ ID NO: 7399 - RNA, 22 nt, Artificial Sequence
  SAMD9L targeting guide sequence portion
caagcucuagaaugcugcuuga

SEQ ID NO: 7400 - RNA, 22 nt, Artificial Sequence
  SAMD9L targeting guide sequence portion
caaugcguaguucuuaaauucc

SEQ ID NO: 7401 - RNA, 22 nt, Artificial Sequence
  SAMD9L targeting guide sequence portion
cagcauucuagagcuuggaauu

SEQ ID NO: 7402 - RNA, 22 nt, Artificial Sequence
  SAMD9L targeting guide sequence portion
cagucucaagcagcauucuaga

SEQ ID NO: 7403 - RNA, 22 nt, Artificial Sequence
  SAMD9L targeting guide sequence portion
cauucuagagcuuggaauuuaa

SEQ ID NO: 7404 - RNA, 22 nt, Artificial Sequence
  SAMD9L targeting guide sequence portion
ccaagcucuagaaugcugcuug

SEQ ID NO: 7405 - RNA, 22 nt, Artificial Sequence
  SAMD9L targeting guide sequence portion
cguaguucuuaaauuccaagcu

SEQ ID NO: 7406 - RNA, 22 nt, Artificial Sequence
  SAMD9L targeting guide sequence portion
cuagagcuuggaauuuaagaac

SEQ ID NO: 7407 - RNA, 22 nt, Artificial Sequence
  SAMD9L targeting guide sequence portion
cucaagcagcauucuagagcuu

SEQ ID NO: 7408 - RNA, 22 nt, Artificial Sequence
  SAMD9L targeting guide sequence portion
cuuaaauuccaagcucuagaau

SEQ ID NO: 7409 - RNA, 22 nt, Artificial Sequence
  SAMD9L targeting guide sequence portion
cuuggaauuuaagaacuacgca

SEQ ID NO: 7410 - RNA, 22 nt, Artificial Sequence
  SAMD9L targeting guide sequence portion
gaacagucucaagcagcauucu

SEQ ID NO: 7411 - RNA, 22 nt, Artificial Sequence
  SAMD9L targeting guide sequence portion
gagcuuggaauuuaagaacuac

SEQ ID NO: 7412 - RNA, 22 nt, Artificial Sequence
  SAMD9L targeting guide sequence portion
gcaaugcguaguucuuaaauuc

SEQ ID NO: 7413 - RNA, 22 nt, Artificial Sequence
  SAMD9L targeting guide sequence portion
gcagcauucuagagcuuggaau

SEQ ID NO: 7414 - RNA, 22 nt, Artificial Sequence
  SAMD9L targeting guide sequence portion
gcauucuagagcuuggaauuua

SEQ ID NO: 7415 - RNA, 22 nt, Artificial Sequence
  SAMD9L targeting guide sequence portion
gcguaguucuuaaauuccaagc

SEQ ID NO: 7416 - RNA, 22 nt, Artificial Sequence
  SAMD9L targeting guide sequence portion
gcuuggaauuuaagaacuacgc

SEQ ID NO: 7417 - RNA, 22 nt, Artificial Sequence
  SAMD9L targeting guide sequence portion
ggcaaugcguaguucuuaaauu

SEQ ID NO: 7418 - RNA, 22 nt, Artificial Sequence
  SAMD9L targeting guide sequence portion
guaguucuuaaauuccaagcuc

SEQ ID NO: 7419 - RNA, 22 nt, Artificial Sequence
  SAMD9L targeting guide sequence portion
gucucaagcagcauucuagagc

SEQ ID NO: 7420 - RNA, 22 nt, Artificial Sequence
  SAMD9L targeting guide sequence portion
guucuuaaauuccaagcucuag

SEQ ID NO: 7421 - RNA, 22 nt, Artificial Sequence
  SAMD9L targeting guide sequence portion
uaaauuccaagcucuagaaugc

SEQ ID NO: 7422 - RNA, 22 nt, Artificial Sequence
  SAMD9L targeting guide sequence portion
uagagcuuggaauuuaagaacu

SEQ ID NO: 7423 - RNA, 22 nt, Artificial Sequence
  SAMD9L targeting guide sequence portion
uaggcaaugcguaguucuuaaa

SEQ ID NO: 7424 - RNA, 22 nt, Artificial Sequence
  SAMD9L targeting guide sequence portion
uaguucuuaaauuccaagcucu

SEQ ID NO: 7425 - RNA, 22 nt, Artificial Sequence
  SAMD9L targeting guide sequence portion
ucaagcagcauucuagagcuug

SEQ ID NO: 7426 - RNA, 22 nt, Artificial Sequence
  SAMD9L targeting guide sequence portion
uccaagcucuagaaugcugcuu

SEQ ID NO: 7427 - RNA, 22 nt, Artificial Sequence
  SAMD9L targeting guide sequence portion
ucuagagcuuggaauuuaagaa

SEQ ID NO: 7428 - RNA, 22 nt, Artificial Sequence
  SAMD9L targeting guide sequence portion
ucucaagcagcauucuagagcu

SEQ ID NO: 7429 - RNA, 22 nt, Artificial Sequence
  SAMD9L targeting guide sequence portion
ucuuaaauuccaagcucuagaa

SEQ ID NO: 7430 - RNA, 22 nt, Artificial Sequence
  SAMD9L targeting guide sequence portion
ugcguaguucuuaaauuccaag

SEQ ID NO: 7431 - RNA, 22 nt, Artificial Sequence
  SAMD9L targeting guide sequence portion
uuaaauuccaagcucuagaaug

SEQ ID NO: 7432 - RNA, 22 nt, Artificial Sequence
  SAMD9L targeting guide sequence portion
uuccaagcucuagaaugcugcu

SEQ ID NO: 7433 - RNA, 22 nt, Artificial Sequence
  SAMD9L targeting guide sequence portion
uucuagagcuuggaauuuaaga

SEQ ID NO: 7434 - RNA, 22 nt, Artificial Sequence
  SAMD9L targeting guide sequence portion
uucuuaaauuccaagcucuaga

SEQ ID NO: 7435 - RNA, 22 nt, Artificial Sequence
  SAMD9L targeting guide sequence portion
uuggaauuuaagaacuacgcau

SEQ ID NO: 7436 - RNA, 20 nt, Artificial Sequence
  SAMD9L targeting guide sequence portion
aaauuccaggcucuagaaug

SEQ ID NO: 7437 - RNA, 20 nt, Artificial Sequence
  SAMD9L targeting guide sequence portion
aagcagcauucuagagccug

SEQ ID NO: 7438 - RNA, 20 nt, Artificial Sequence
  SAMD9L targeting guide sequence portion
aauuccaggcucuagaaugc

SEQ ID NO: 7439 - RNA, 20 nt, Artificial Sequence
  SAMD9L targeting guide sequence portion
agagccuggaauuuaagaac

SEQ ID NO: 7440 - RNA, 20 nt, Artificial Sequence
  SAMD9L targeting guide sequence portion
agcagcauucuagagccugg

SEQ ID NO: 7441 - RNA, 20 nt, Artificial Sequence
  SAMD9L targeting guide sequence portion
agcauucuagagccuggaau

SEQ ID NO: 7442 - RNA, 20 nt, Artificial Sequence
  SAMD9L targeting guide sequence portion
agccuggaauuuaagaacua

SEQ ID NO: 7443 - RNA, 20 nt, Artificial Sequence
  SAMD9L targeting guide sequence portion
aggcucuagaaugcugcuug

SEQ ID NO: 7444 - RNA, 20 nt, Artificial Sequence
  SAMD9L targeting guide sequence portion
aguucuuaaauuccaggcuc

SEQ ID NO: 7445 - RNA, 20 nt, Artificial Sequence
  SAMD9L targeting guide sequence portion
auuccaggcucuagaaugcu

SEQ ID NO: 7446 - RNA, 20 nt, Artificial Sequence
  SAMD9L targeting guide sequence portion
auucuagagccuggaauuua

SEQ ID NO: 7447 - RNA, 20 nt, Artificial Sequence
  SAMD9L targeting guide sequence portion
caagcagcauucuagagccu

SEQ ID NO: 7448 - RNA, 20 nt, Artificial Sequence
  SAMD9L targeting guide sequence portion
cagcauucuagagccuggaa

SEQ ID NO: 7449 - RNA, 20 nt, Artificial Sequence
  SAMD9L targeting guide sequence portion
caggcucuagaaugcugcuu

SEQ ID NO: 7450 - RNA, 20 nt, Artificial Sequence
  SAMD9L targeting guide sequence portion
cauucuagagccuggaauuu

SEQ ID NO: 7451 - RNA, 20 nt, Artificial Sequence
  SAMD9L targeting guide sequence portion
ccaggcucuagaaugcugcu

SEQ ID NO: 7452 - RNA, 20 nt, Artificial Sequence
  SAMD9L targeting guide sequence portion
ccuggaauuuaagaacuacg

SEQ ID NO: 7453 - RNA, 20 nt, Artificial Sequence
  SAMD9L targeting guide sequence portion
cguaguucuuaaauuccagg

SEQ ID NO: 7454 - RNA, 20 nt, Artificial Sequence
  SAMD9L targeting guide sequence portion
cuagagccuggaauuuaaga

SEQ ID NO: 7455 - RNA, 20 nt, Artificial Sequence
  SAMD9L targeting guide sequence portion
cuggaauuuaagaacuacgc

SEQ ID NO: 7456 - RNA, 20 nt, Artificial Sequence
  SAMD9L targeting guide sequence portion
cuuaaauuccaggcucuaga

SEQ ID NO: 7457 - RNA, 20 nt, Artificial Sequence
  SAMD9L targeting guide sequence portion
gagccuggaauuuaagaacu

SEQ ID NO: 7458 - RNA, 20 nt, Artificial Sequence
  SAMD9L targeting guide sequence portion
gcagcauucuagagccugga

SEQ ID NO: 7459 - RNA, 20 nt, Artificial Sequence
  SAMD9L targeting guide sequence portion
gcauucuagagccuggaauu

SEQ ID NO: 7460 - RNA, 20 nt, Artificial Sequence
  SAMD9L targeting guide sequence portion
gccuggaauuuaagaacuac

SEQ ID NO: 7461 - RNA, 20 nt, Artificial Sequence
  SAMD9L targeting guide sequence portion
gcguaguucuuaaauuccag

SEQ ID NO: 7462 - RNA, 20 nt, Artificial Sequence
  SAMD9L targeting guide sequence portion
ggcucuagaaugcugcuuga

SEQ ID NO: 7463 - RNA, 20 nt, Artificial Sequence
  SAMD9L targeting guide sequence portion
guaguucuuaaauuccaggc

SEQ ID NO: 7464 - RNA, 20 nt, Artificial Sequence
  SAMD9L targeting guide sequence portion
guucuuaaauuccaggcucu

SEQ ID NO: 7465 - RNA, 20 nt, Artificial Sequence
  SAMD9L targeting guide sequence portion
uaaauuccaggcucuagaau

SEQ ID NO: 7466 - RNA, 20 nt, Artificial Sequence
  SAMD9L targeting guide sequence portion
uagagccuggaauuuaagaa

SEQ ID NO: 7467 - RNA, 20 nt, Artificial Sequence
  SAMD9L targeting guide sequence portion
uaguucuuaaauuccaggcu

SEQ ID NO: 7468 - RNA, 20 nt, Artificial Sequence
  SAMD9L targeting guide sequence portion
ucaagcagcauucuagagcc

SEQ ID NO: 7469 - RNA, 20 nt, Artificial Sequence
  SAMD9L targeting guide sequence portion
uccaggcucuagaaugcugc

SEQ ID NO: 7470 - RNA, 20 nt, Artificial Sequence
  SAMD9L targeting guide sequence portion
ucuagagccuggaauuuaag

SEQ ID NO: 7471 - RNA, 20 nt, Artificial Sequence
  SAMD9L targeting guide sequence portion
ucuuaaauuccaggcucuag

SEQ ID NO: 7472 - RNA, 20 nt, Artificial Sequence
  SAMD9L targeting guide sequence portion
uuaaauuccaggcucuagaa

SEQ ID NO: 7473 - RNA, 20 nt, Artificial Sequence
  SAMD9L targeting guide sequence portion
uuccaggcucuagaaugcug

SEQ ID NO: 7474 - RNA, 20 nt, Artificial Sequence
  SAMD9L targeting guide sequence portion
uucuagagccuggaauuuaa

SEQ ID NO: 7475 - RNA, 20 nt, Artificial Sequence
  SAMD9L targeting guide sequence portion
uucuuaaauuccaggcucua

SEQ ID NO: 7476 - RNA, 21 nt, Artificial Sequence
  SAMD9L targeting guide sequence portion
aaauuccaggcucuagaaugc

SEQ ID NO: 7477 - RNA, 21 nt, Artificial Sequence
  SAMD9L targeting guide sequence portion
aagcagcauucuagagccugg

SEQ ID NO: 7478 - RNA, 21 nt, Artificial Sequence
  SAMD9L targeting guide sequence portion
aauuccaggcucuagaaugcu

SEQ ID NO: 7479 - RNA, 21 nt, Artificial Sequence
  SAMD9L targeting guide sequence portion
agagccuggaauuuaagaacu

SEQ ID NO: 7480 - RNA, 21 nt, Artificial Sequence
  SAMD9L targeting guide sequence portion
agcagcauucuagagccugga

SEQ ID NO: 7481 - RNA, 21 nt, Artificial Sequence
  SAMD9L targeting guide sequence portion
agcauucuagagccuggaauu

SEQ ID NO: 7482 - RNA, 21 nt, Artificial Sequence
  SAMD9L targeting guide sequence portion
agccuggaauuuaagaacuac

SEQ ID NO: 7483 - RNA, 21 nt, Artificial Sequence
  SAMD9L targeting guide sequence portion
aggcucuagaaugcugcuuga

SEQ ID NO: 7484 - RNA, 21 nt, Artificial Sequence
  SAMD9L targeting guide sequence portion
aguucuuaaauuccaggcucu

SEQ ID NO: 7485 - RNA, 21 nt, Artificial Sequence
  SAMD9L targeting guide sequence portion
auuccaggcucuagaaugcug

SEQ ID NO: 7486 - RNA, 21 nt, Artificial Sequence
  SAMD9L targeting guide sequence portion
auucuagagccuggaauuuaa

SEQ ID NO: 7487 - RNA, 21 nt, Artificial Sequence
  SAMD9L targeting guide sequence portion
caagcagcauucuagagccug

SEQ ID NO: 7488 - RNA, 21 nt, Artificial Sequence
  SAMD9L targeting guide sequence portion
cagcauucuagagccuggaau

SEQ ID NO: 7489 - RNA, 21 nt, Artificial Sequence
  SAMD9L targeting guide sequence portion
caggcucuagaaugcugcuug

SEQ ID NO: 7490 - RNA, 21 nt, Artificial Sequence
  SAMD9L targeting guide sequence portion
cauucuagagccuggaauuua

SEQ ID NO: 7491 - RNA, 21 nt, Artificial Sequence
  SAMD9L targeting guide sequence portion
ccaggcucuagaaugcugcuu

SEQ ID NO: 7492 - RNA, 21 nt, Artificial Sequence
  SAMD9L targeting guide sequence portion
ccuggaauuuaagaacuacgc

SEQ ID NO: 7493 - RNA, 21 nt, Artificial Sequence
  SAMD9L targeting guide sequence portion
cguaguucuuaaauuccaggc

SEQ ID NO: 7494 - RNA, 21 nt, Artificial Sequence
  SAMD9L targeting guide sequence portion
cuagagccuggaauuuaagaa

SEQ ID NO: 7495 - RNA, 21 nt, Artificial Sequence
  SAMD9L targeting guide sequence portion
cucaagcagcauucuagagcc

SEQ ID NO: 7496 - RNA, 21 nt, Artificial Sequence
  SAMD9L targeting guide sequence portion
cuggaauuuaagaacuacgca

SEQ ID NO: 7497 - RNA, 21 nt, Artificial Sequence
  SAMD9L targeting guide sequence portion
cuuaaauuccaggcucuagaa

SEQ ID NO: 7498 - RNA, 21 nt, Artificial Sequence
  SAMD9L targeting guide sequence portion
gagccuggaauuuaagaacua

SEQ ID NO: 7499 - RNA, 21 nt, Artificial Sequence
  SAMD9L targeting guide sequence portion
gcagcauucuagagccuggaa

SEQ ID NO: 7500 - RNA, 21 nt, Artificial Sequence
  SAMD9L targeting guide sequence portion
gcauucuagagccuggaauuu

SEQ ID NO: 7501 - RNA, 21 nt, Artificial Sequence
  SAMD9L targeting guide sequence portion
gccuggaauuuaagaacuacg

SEQ ID NO: 7502 - RNA, 21 nt, Artificial Sequence
  SAMD9L targeting guide sequence portion
gcguaguucuuaaauuccagg

SEQ ID NO: 7503 - RNA, 21 nt, Artificial Sequence
  SAMD9L targeting guide sequence portion
ggcucuagaaugcugcuugag

SEQ ID NO: 7504 - RNA, 21 nt, Artificial Sequence
  SAMD9L targeting guide sequence portion
guaguucuuaaauuccaggcu

SEQ ID NO: 7505 - RNA, 21 nt, Artificial Sequence
  SAMD9L targeting guide sequence portion
guucuuaaauuccaggcucua

SEQ ID NO: 7506 - RNA, 21 nt, Artificial Sequence
  SAMD9L targeting guide sequence portion
uaaauuccaggcucuagaaug

SEQ ID NO: 7507 - RNA, 21 nt, Artificial Sequence
  SAMD9L targeting guide sequence portion
uagagccuggaauuuaagaac

SEQ ID NO: 7508 - RNA, 21 nt, Artificial Sequence
  SAMD9L targeting guide sequence portion
uaguucuuaaauuccaggcuc

SEQ ID NO: 7509 - RNA, 21 nt, Artificial Sequence
  SAMD9L targeting guide sequence portion
ucaagcagcauucuagagccu

SEQ ID NO: 7510 - RNA, 21 nt, Artificial Sequence
  SAMD9L targeting guide sequence portion
uccaggcucuagaaugcugcu

SEQ ID NO: 7511 - RNA, 21 nt, Artificial Sequence
  SAMD9L targeting guide sequence portion
ucuagagccuggaauuuaaga

SEQ ID NO: 7512 - RNA, 21 nt, Artificial Sequence
  SAMD9L targeting guide sequence portion
ucuuaaauuccaggcucuaga

SEQ ID NO: 7513 - RNA, 21 nt, Artificial Sequence
  SAMD9L targeting guide sequence portion
ugcguaguucuuaaauuccag

SEQ ID NO: 7514 - RNA, 21 nt, Artificial Sequence
  SAMD9L targeting guide sequence portion
uuaaauuccaggcucuagaau

SEQ ID NO: 7515 - RNA, 21 nt, Artificial Sequence
  SAMD9L targeting guide sequence portion
uuccaggcucuagaaugcugc

SEQ ID NO: 7516 - RNA, 21 nt, Artificial Sequence
  SAMD9L targeting guide sequence portion
uucuagagccuggaauuuaag

SEQ ID NO: 7517 - RNA, 21 nt, Artificial Sequence
  SAMD9L targeting guide sequence portion
uucuuaaauuccaggcucuag

SEQ ID NO: 7518 - RNA, 22 nt, Artificial Sequence
  SAMD9L targeting guide sequence portion
aaauuccaggcucuagaaugcu

SEQ ID NO: 7519 - RNA, 22 nt, Artificial Sequence
  SAMD9L targeting guide sequence portion
aagcagcauucuagagccugga

SEQ ID NO: 7520 - RNA, 22 nt, Artificial Sequence
  SAMD9L targeting guide sequence portion
aauuccaggcucuagaaugcug

SEQ ID NO: 7521 - RNA, 22 nt, Artificial Sequence
  SAMD9L targeting guide sequence portion
agagccuggaauuuaagaacua

SEQ ID NO: 7522 - RNA, 22 nt, Artificial Sequence
  SAMD9L targeting guide sequence portion
agcagcauucuagagccuggaa

SEQ ID NO: 7523 - RNA, 22 nt, Artificial Sequence
  SAMD9L targeting guide sequence portion
agcauucuagagccuggaauuu

SEQ ID NO: 7524 - RNA, 22 nt, Artificial Sequence
  SAMD9L targeting guide sequence portion
agccuggaauuuaagaacuacg

SEQ ID NO: 7525 - RNA, 22 nt, Artificial Sequence
  SAMD9L targeting guide sequence portion
aggcucuagaaugcugcuugag

SEQ ID NO: 7526 - RNA, 22 nt, Artificial Sequence
  SAMD9L targeting guide sequence portion
aguucuuaaauuccaggcucua

SEQ ID NO: 7527 - RNA, 22 nt, Artificial Sequence
  SAMD9L targeting guide sequence portion
augcguaguucuuaaauuccag

SEQ ID NO: 7528 - RNA, 22 nt, Artificial Sequence
  SAMD9L targeting guide sequence portion
auuccaggcucuagaaugcugc

SEQ ID NO: 7529 - RNA, 22 nt, Artificial Sequence
  SAMD9L targeting guide sequence portion
auucuagagccuggaauuuaag

SEQ ID NO: 7530 - RNA, 22 nt, Artificial Sequence
  SAMD9L targeting guide sequence portion
caagcagcauucuagagccugg

SEQ ID NO: 7531 - RNA, 22 nt, Artificial Sequence
  SAMD9L targeting guide sequence portion
cagcauucuagagccuggaauu

SEQ ID NO: 7532 - RNA, 22 nt, Artificial Sequence
  SAMD9L targeting guide sequence portion
caggcucuagaaugcugcuuga

SEQ ID NO: 7533 - RNA, 22 nt, Artificial Sequence
  SAMD9L targeting guide sequence portion
cauucuagagccuggaauuuaa

SEQ ID NO: 7534 - RNA, 22 nt, Artificial Sequence
  SAMD9L targeting guide sequence portion
ccaggcucuagaaugcugcuug

SEQ ID NO: 7535 - RNA, 22 nt, Artificial Sequence
  SAMD9L targeting guide sequence portion
ccuggaauuuaagaacuacgca

SEQ ID NO: 7536 - RNA, 22 nt, Artificial Sequence
  SAMD9L targeting guide sequence portion
cguaguucuuaaauuccaggcu

SEQ ID NO: 7537 - RNA, 22 nt, Artificial Sequence
  SAMD9L targeting guide sequence portion
cuagagccuggaauuuaagaac

SEQ ID NO: 7538 - RNA, 22 nt, Artificial Sequence
  SAMD9L targeting guide sequence portion
cucaagcagcauucuagagccu

SEQ ID NO: 7539 - RNA, 22 nt, Artificial Sequence
  SAMD9L targeting guide sequence portion
cuggaauuuaagaacuacgcau

SEQ ID NO: 7540 - RNA, 22 nt, Artificial Sequence
  SAMD9L targeting guide sequence portion
cuuaaauuccaggcucuagaau

SEQ ID NO: 7541 - RNA, 22 nt, Artificial Sequence
  SAMD9L targeting guide sequence portion
gagccuggaauuuaagaacuac

SEQ ID NO: 7542 - RNA, 22 nt, Artificial Sequence
  SAMD9L targeting guide sequence portion
gcagcauucuagagccuggaau

SEQ ID NO: 7543 - RNA, 22 nt, Artificial Sequence
  SAMD9L targeting guide sequence portion
gcauucuagagccuggaauuua

SEQ ID NO: 7544 - RNA, 22 nt, Artificial Sequence
  SAMD9L targeting guide sequence portion
gccuggaauuuaagaacuacgc

SEQ ID NO: 7545 - RNA, 22 nt, Artificial Sequence
  SAMD9L targeting guide sequence portion
gcguaguucuuaaauuccaggc

SEQ ID NO: 7546 - RNA, 22 nt, Artificial Sequence
  SAMD9L targeting guide sequence portion
ggcucuagaaugcugcuugaga

SEQ ID NO: 7547 - RNA, 22 nt, Artificial Sequence
  SAMD9L targeting guide sequence portion
guaguucuuaaauuccaggcuc

SEQ ID NO: 7548 - RNA, 22 nt, Artificial Sequence
  SAMD9L targeting guide sequence portion
guucuuaaauuccaggcucuag

SEQ ID NO: 7549 - RNA, 22 nt, Artificial Sequence
  SAMD9L targeting guide sequence portion
uaaauuccaggcucuagaaugc

SEQ ID NO: 7550 - RNA, 22 nt, Artificial Sequence
  SAMD9L targeting guide sequence portion
uagagccuggaauuuaagaacu

SEQ ID NO: 7551 - RNA, 22 nt, Artificial Sequence
  SAMD9L targeting guide sequence portion
uaguucuuaaauuccaggcucu

SEQ ID NO: 7552 - RNA, 22 nt, Artificial Sequence
  SAMD9L targeting guide sequence portion
ucaagcagcauucuagagccug

SEQ ID NO: 7553 - RNA, 22 nt, Artificial Sequence
  SAMD9L targeting guide sequence portion
uccaggcucuagaaugcugcuu

SEQ ID NO: 7554 - RNA, 22 nt, Artificial Sequence
  SAMD9L targeting guide sequence portion
ucuagagccuggaauuuaagaa

SEQ ID NO: 7555 - RNA, 22 nt, Artificial Sequence
  SAMD9L targeting guide sequence portion
ucucaagcagcauucuagagcc

SEQ ID NO: 7556 - RNA, 22 nt, Artificial Sequence
  SAMD9L targeting guide sequence portion
ucuuaaauuccaggcucuagaa

SEQ ID NO: 7557 - RNA, 22 nt, Artificial Sequence
  SAMD9L targeting guide sequence portion
ugcguaguucuuaaauuccagg

SEQ ID NO: 7558 - RNA, 22 nt, Artificial Sequence
  SAMD9L targeting guide sequence portion
uuaaauuccaggcucuagaaug

SEQ ID NO: 7559 - RNA, 22 nt, Artificial Sequence
  SAMD9L targeting guide sequence portion
uuccaggcucuagaaugcugcu

SEQ ID NO: 7560 - RNA, 22 nt, Artificial Sequence
  SAMD9L targeting guide sequence portion
uucuagagccuggaauuuaaga

SEQ ID NO: 7561 - RNA, 22 nt, Artificial Sequence
  SAMD9L targeting guide sequence portion
uucuuaaauuccaggcucuaga

SEQ ID NO: 7562 - RNA, 20 nt, Artificial Sequence
  SAMD9L targeting guide sequence portion
aagggcaagggguacaagga

SEQ ID NO: 7563 - RNA, 20 nt, Artificial Sequence
  SAMD9L targeting guide sequence portion
aagggguacaaggagugugu

SEQ ID NO: 7564 - RNA, 20 nt, Artificial Sequence
  SAMD9L targeting guide sequence portion
acacacacacuccuuguacc

SEQ ID NO: 7565 - RNA, 20 nt, Artificial Sequence
  SAMD9L targeting guide sequence portion
acacacacuccuuguacccc

SEQ ID NO: 7566 - RNA, 20 nt, Artificial Sequence
  SAMD9L targeting guide sequence portion
acacacuccuuguaccccuu

SEQ ID NO: 7567 - RNA, 20 nt, Artificial Sequence
  SAMD9L targeting guide sequence portion
acacuccuuguaccccuugc

SEQ ID NO: 7568 - RNA, 20 nt, Artificial Sequence
  SAMD9L targeting guide sequence portion
acuccuuguaccccuugccc

SEQ ID NO: 7569 - RNA, 20 nt, Artificial Sequence
  SAMD9L targeting guide sequence portion
agaagggcaagggguacaag

SEQ ID NO: 7570 - RNA, 20 nt, Artificial Sequence
  SAMD9L targeting guide sequence portion
agggcaagggguacaaggag

SEQ ID NO: 7571 - RNA, 20 nt, Artificial Sequence
  SAMD9L targeting guide sequence portion
agggguacaaggagugugug

SEQ ID NO: 7572 - RNA, 20 nt, Artificial Sequence
  SAMD9L targeting guide sequence portion
caagggguacaaggagugug

SEQ ID NO: 7573 - RNA, 20 nt, Artificial Sequence
  SAMD9L targeting guide sequence portion
cacacacacacuccuuguac

SEQ ID NO: 7574 - RNA, 20 nt, Artificial Sequence
  SAMD9L targeting guide sequence portion
cacacacacuccuuguaccc

SEQ ID NO: 7575 - RNA, 20 nt, Artificial Sequence
  SAMD9L targeting guide sequence portion
cacacacuccuuguaccccu

SEQ ID NO: 7576 - RNA, 20 nt, Artificial Sequence
  SAMD9L targeting guide sequence portion
cacacuccuuguaccccuug

SEQ ID NO: 7577 - RNA, 20 nt, Artificial Sequence
  SAMD9L targeting guide sequence portion
cacuccuuguaccccuugcc

SEQ ID NO: 7578 - RNA, 20 nt, Artificial Sequence
  SAMD9L targeting guide sequence portion
cuccuuguaccccuugcccu

SEQ ID NO: 7579 - RNA, 20 nt, Artificial Sequence
  SAMD9L targeting guide sequence portion
gaagggcaagggguacaagg

SEQ ID NO: 7580 - RNA, 20 nt, Artificial Sequence
  SAMD9L targeting guide sequence portion
gagaagggcaagggguacaa

SEQ ID NO: 7581 - RNA, 20 nt, Artificial Sequence
  SAMD9L targeting guide sequence portion
gcaagggguacaaggagugu

SEQ ID NO: 7582 - RNA, 20 nt, Artificial Sequence
  SAMD9L targeting guide sequence portion
ggagaagggcaagggguaca

SEQ ID NO: 7583 - RNA, 20 nt, Artificial Sequence
  SAMD9L targeting guide sequence portion
ggcaagggguacaaggagug

SEQ ID NO: 7584 - RNA, 20 nt, Artificial Sequence
  SAMD9L targeting guide sequence portion
gggagaagggcaagggguac

SEQ ID NO: 7585 - RNA, 20 nt, Artificial Sequence
  SAMD9L targeting guide sequence portion
gggcaagggguacaaggagu

SEQ ID NO: 7586 - RNA, 20 nt, Artificial Sequence
  SAMD9L targeting guide sequence portion
gggguacaaggagugugugu

SEQ ID NO: 7587 - RNA, 20 nt, Artificial Sequence
  SAMD9L targeting guide sequence portion
ggguacaaggagugugugug

SEQ ID NO: 7588 - RNA, 20 nt, Artificial Sequence
  SAMD9L targeting guide sequence portion
gguacaaggagugugugugu

SEQ ID NO: 7589 - RNA, 20 nt, Artificial Sequence
  SAMD9L targeting guide sequence portion
uccuuguaccccuugcccuu

SEQ ID NO: 7590 - RNA, 20 nt, Artificial Sequence
  SAMD9L targeting guide sequence portion
ugggagaagggcaaggggua

SEQ ID NO: 7591 - RNA, 21 nt, Artificial Sequence
  SAMD9L targeting guide sequence portion
aagggcaagggguacaaggag

SEQ ID NO: 7592 - RNA, 21 nt, Artificial Sequence
  SAMD9L targeting guide sequence portion
aagggguacaaggagugugug

SEQ ID NO: 7593 - RNA, 21 nt, Artificial Sequence
  SAMD9L targeting guide sequence portion
acacacacacuccuuguaccc

SEQ ID NO: 7594 - RNA, 21 nt, Artificial Sequence
  SAMD9L targeting guide sequence portion
acacacacuccuuguaccccu

SEQ ID NO: 7595 - RNA, 21 nt, Artificial Sequence
  SAMD9L targeting guide sequence portion
acacacuccuuguaccccuug

SEQ ID NO: 7596 - RNA, 21 nt, Artificial Sequence
  SAMD9L targeting guide sequence portion
acacuccuuguaccccuugcc

SEQ ID NO: 7597 - RNA, 21 nt, Artificial Sequence
  SAMD9L targeting guide sequence portion
acuccuuguaccccuugcccu

SEQ ID NO: 7598 - RNA, 21 nt, Artificial Sequence
  SAMD9L targeting guide sequence portion
agaagggcaagggguacaagg

SEQ ID NO: 7599 - RNA, 21 nt, Artificial Sequence
  SAMD9L targeting guide sequence portion
agggcaagggguacaaggagu

SEQ ID NO: 7600 - RNA, 21 nt, Artificial Sequence
  SAMD9L targeting guide sequence portion
agggguacaaggagugugugu

SEQ ID NO: 7601 - RNA, 21 nt, Artificial Sequence
  SAMD9L targeting guide sequence portion
caagggguacaaggagugugu

SEQ ID NO: 7602 - RNA, 21 nt, Artificial Sequence
  SAMD9L targeting guide sequence portion
cacacacacacuccuuguacc

SEQ ID NO: 7603 - RNA, 21 nt, Artificial Sequence
  SAMD9L targeting guide sequence portion
cacacacacuccuuguacccc

SEQ ID NO: 7604 - RNA, 21 nt, Artificial Sequence
  SAMD9L targeting guide sequence portion
cacacacuccuuguaccccuu

SEQ ID NO: 7605 - RNA, 21 nt, Artificial Sequence
  SAMD9L targeting guide sequence portion
cacacuccuuguaccccuugc

SEQ ID NO: 7606 - RNA, 21 nt, Artificial Sequence
  SAMD9L targeting guide sequence portion
cacuccuuguaccccuugccc

SEQ ID NO: 7607 - RNA, 21 nt, Artificial Sequence
  SAMD9L targeting guide sequence portion
cuccuuguaccccuugcccuu

SEQ ID NO: 7608 - RNA, 21 nt, Artificial Sequence
  SAMD9L targeting guide sequence portion
cugggagaagggcaaggggua

SEQ ID NO: 7609 - RNA, 21 nt, Artificial Sequence
  SAMD9L targeting guide sequence portion
gaagggcaagggguacaagga

SEQ ID NO: 7610 - RNA, 21 nt, Artificial Sequence
  SAMD9L targeting guide sequence portion
gagaagggcaagggguacaag

SEQ ID NO: 7611 - RNA, 21 nt, Artificial Sequence
  SAMD9L targeting guide sequence portion
gcaagggguacaaggagugug

SEQ ID NO: 7612 - RNA, 21 nt, Artificial Sequence
  SAMD9L targeting guide sequence portion
ggagaagggcaagggguacaa

SEQ ID NO: 7613 - RNA, 21 nt, Artificial Sequence
  SAMD9L targeting guide sequence portion
ggcaagggguacaaggagugu

SEQ ID NO: 7614 - RNA, 21 nt, Artificial Sequence
  SAMD9L targeting guide sequence portion
gggagaagggcaagggguaca

SEQ ID NO: 7615 - RNA, 21 nt, Artificial Sequence
  SAMD9L targeting guide sequence portion
gggcaagggguacaaggagug

SEQ ID NO: 7616 - RNA, 21 nt, Artificial Sequence
  SAMD9L targeting guide sequence portion
gggguacaaggagugugugug

SEQ ID NO: 7617 - RNA, 21 nt, Artificial Sequence
  SAMD9L targeting guide sequence portion
ggguacaaggagugugugugu

SEQ ID NO: 7618 - RNA, 21 nt, Artificial Sequence
  SAMD9L targeting guide sequence portion
gguacaaggagugugugugug

SEQ ID NO: 7619 - RNA, 21 nt, Artificial Sequence
  SAMD9L targeting guide sequence portion
uccuuguaccccuugcccuuc

SEQ ID NO: 7620 - RNA, 21 nt, Artificial Sequence
  SAMD9L targeting guide sequence portion
ugggagaagggcaagggguac

SEQ ID NO: 7621 - RNA, 22 nt, Artificial Sequence
  SAMD9L targeting guide sequence portion
aagggcaagggguacaaggagu

SEQ ID NO: 7622 - RNA, 22 nt, Artificial Sequence
  SAMD9L targeting guide sequence portion
aagggguacaaggagugugugu

SEQ ID NO: 7623 - RNA, 22 nt, Artificial Sequence
  SAMD9L targeting guide sequence portion
acacacacacuccuuguacccc

SEQ ID NO: 7624 - RNA, 22 nt, Artificial Sequence
  SAMD9L targeting guide sequence portion
acacacacuccuuguaccccuu

SEQ ID NO: 7625 - RNA, 22 nt, Artificial Sequence
  SAMD9L targeting guide sequence portion
acacacuccuuguaccccuugc

SEQ ID NO: 7626 - RNA, 22 nt, Artificial Sequence
  SAMD9L targeting guide sequence portion
acacuccuuguaccccuugccc

SEQ ID NO: 7627 - RNA, 22 nt, Artificial Sequence
  SAMD9L targeting guide sequence portion
acuccuuguaccccuugcccuu

SEQ ID NO: 7628 - RNA, 22 nt, Artificial Sequence
  SAMD9L targeting guide sequence portion
agaagggcaagggguacaagga

SEQ ID NO: 7629 - RNA, 22 nt, Artificial Sequence
  SAMD9L targeting guide sequence portion
agggcaagggguacaaggagug

SEQ ID NO: 7630 - RNA, 22 nt, Artificial Sequence
  SAMD9L targeting guide sequence portion
agggguacaaggagugugugug

SEQ ID NO: 7631 - RNA, 22 nt, Artificial Sequence
  SAMD9L targeting guide sequence portion
caagggguacaaggagugugug

SEQ ID NO: 7632 - RNA, 22 nt, Artificial Sequence
  SAMD9L targeting guide sequence portion
cacacacacacuccuuguaccc

SEQ ID NO: 7633 - RNA, 22 nt, Artificial Sequence
  SAMD9L targeting guide sequence portion
cacacacacuccuuguaccccu

SEQ ID NO: 7634 - RNA, 22 nt, Artificial Sequence
  SAMD9L targeting guide sequence portion
cacacacuccuuguaccccuug

SEQ ID NO: 7635 - RNA, 22 nt, Artificial Sequence
  SAMD9L targeting guide sequence portion
cacacuccuuguaccccuugcc

SEQ ID NO: 7636 - RNA, 22 nt, Artificial Sequence
  SAMD9L targeting guide sequence portion
cacuccuuguaccccuugcccu

SEQ ID NO: 7637 - RNA, 22 nt, Artificial Sequence
  SAMD9L targeting guide sequence portion
cuccuuguaccccuugcccuuc

SEQ ID NO: 7638 - RNA, 22 nt, Artificial Sequence
  SAMD9L targeting guide sequence portion
cugggagaagggcaagggguac

SEQ ID NO: 7639 - RNA, 22 nt, Artificial Sequence
  SAMD9L targeting guide sequence portion
gaagggcaagggguacaaggag

SEQ ID NO: 7640 - RNA, 22 nt, Artificial Sequence
  SAMD9L targeting guide sequence portion
gagaagggcaagggguacaagg

SEQ ID NO: 7641 - RNA, 22 nt, Artificial Sequence
  SAMD9L targeting guide sequence portion
gcaagggguacaaggagugugu

SEQ ID NO: 7642 - RNA, 22 nt, Artificial Sequence
  SAMD9L targeting guide sequence portion
gcugggagaagggcaaggggua

SEQ ID NO: 7643 - RNA, 22 nt, Artificial Sequence
  SAMD9L targeting guide sequence portion
ggagaagggcaagggguacaag

SEQ ID NO: 7644 - RNA, 22 nt, Artificial Sequence
  SAMD9L targeting guide sequence portion
ggcaagggguacaaggagugug

SEQ ID NO: 7645 - RNA, 22 nt, Artificial Sequence
  SAMD9L targeting guide sequence portion
gggagaagggcaagggguacaa

SEQ ID NO: 7646 - RNA, 22 nt, Artificial Sequence
  SAMD9L targeting guide sequence portion
gggcaagggguacaaggagugu

SEQ ID NO: 7647 - RNA, 22 nt, Artificial Sequence
  SAMD9L targeting guide sequence portion
gggguacaaggagugugugugu

SEQ ID NO: 7648 - RNA, 22 nt, Artificial Sequence
  SAMD9L targeting guide sequence portion
ggguacaaggagugugugugug

SEQ ID NO: 7649 - RNA, 22 nt, Artificial Sequence
  SAMD9L targeting guide sequence portion
uccuuguaccccuugcccuucu

SEQ ID NO: 7650 - RNA, 22 nt, Artificial Sequence
  SAMD9L targeting guide sequence portion
ugggagaagggcaagggguaca

SEQ ID NO: 7651 - RNA, 20 nt, Artificial Sequence
  SAMD9L targeting guide sequence portion
aaaaacuuauguggaaggua

SEQ ID NO: 7652 - RNA, 20 nt, Artificial Sequence
  SAMD9L targeting guide sequence portion
aaaacuuauguggaagguaa

SEQ ID NO: 7653 - RNA, 20 nt, Artificial Sequence
  SAMD9L targeting guide sequence portion
aaacuuauguggaagguaaa

SEQ ID NO: 7654 - RNA, 20 nt, Artificial Sequence
  SAMD9L targeting guide sequence portion
aacaauauauuuaccuucca

SEQ ID NO: 7655 - RNA, 20 nt, Artificial Sequence
  SAMD9L targeting guide sequence portion
aacuuauguggaagguaaau

SEQ ID NO: 7656 - RNA, 20 nt, Artificial Sequence
  SAMD9L targeting guide sequence portion
aaguuuuuauugauaccaag

SEQ ID NO: 7657 - RNA, 20 nt, Artificial Sequence
  SAMD9L targeting guide sequence portion
aauaaaaacuuauguggaag

SEQ ID NO: 7658 - RNA, 20 nt, Artificial Sequence
  SAMD9L targeting guide sequence portion
aauauauuuaccuuccacau

SEQ ID NO: 7659 - RNA, 20 nt, Artificial Sequence
  SAMD9L targeting guide sequence portion
acaauauauuuaccuuccac

SEQ ID NO: 7660 - RNA, 20 nt, Artificial Sequence
  SAMD9L targeting guide sequence portion
acauaaguuuuuauugauac

SEQ ID NO: 7661 - RNA, 20 nt, Artificial Sequence
  SAMD9L targeting guide sequence portion
accuuccacauaaguuuuua

SEQ ID NO: 7662 - RNA, 20 nt, Artificial Sequence
  SAMD9L targeting guide sequence portion
acuuauguggaagguaaaua

SEQ ID NO: 7663 - RNA, 20 nt, Artificial Sequence
  SAMD9L targeting guide sequence portion
auaaaaacuuauguggaagg

SEQ ID NO: 7664 - RNA, 20 nt, Artificial Sequence
  SAMD9L targeting guide sequence portion
auaaguuuuuauugauacca

SEQ ID NO: 7665 - RNA, 20 nt, Artificial Sequence
  SAMD9L targeting guide sequence portion
auauauuuaccuuccacaua

SEQ ID NO: 7666 - RNA, 20 nt, Artificial Sequence
  SAMD9L targeting guide sequence portion
auauuuaccuuccacauaag

SEQ ID NO: 7667 - RNA, 20 nt, Artificial Sequence
  SAMD9L targeting guide sequence portion
aucaauaaaaacuuaugugg

SEQ ID NO: 7668 - RNA, 20 nt, Artificial Sequence
  SAMD9L targeting guide sequence portion
aucuugguaucaauaaaaac

SEQ ID NO: 7669 - RNA, 20 nt, Artificial Sequence
  SAMD9L targeting guide sequence portion
auuuaccuuccacauaaguu

SEQ ID NO: 7670 - RNA, 20 nt, Artificial Sequence
  SAMD9L targeting guide sequence portion
caauaaaaacuuauguggaa

SEQ ID NO: 7671 - RNA, 20 nt, Artificial Sequence
  SAMD9L targeting guide sequence portion
caauauauuuaccuuccaca

SEQ ID NO: 7672 - RNA, 20 nt, Artificial Sequence
  SAMD9L targeting guide sequence portion
cacauaaguuuuuauugaua

SEQ ID NO: 7673 - RNA, 20 nt, Artificial Sequence
  SAMD9L targeting guide sequence portion
cauaaguuuuuauugauacc

SEQ ID NO: 7674 - RNA, 20 nt, Artificial Sequence
  SAMD9L targeting guide sequence portion
caucuugguaucaauaaaaa

SEQ ID NO: 7675 - RNA, 20 nt, Artificial Sequence
  SAMD9L targeting guide sequence portion
ccacauaaguuuuuauugau

SEQ ID NO: 7676 - RNA, 20 nt, Artificial Sequence
  SAMD9L targeting guide sequence portion
ccucaucuugguaucaauaa

SEQ ID NO: 7677 - RNA, 20 nt, Artificial Sequence
  SAMD9L targeting guide sequence portion
ccuuccacauaaguuuuuau

SEQ ID NO: 7678 - RNA, 20 nt, Artificial Sequence
  SAMD9L targeting guide sequence portion
cucaucuugguaucaauaaa

SEQ ID NO: 7679 - RNA, 20 nt, Artificial Sequence
  SAMD9L targeting guide sequence portion
cuuauguggaagguaaauau

SEQ ID NO: 7680 - RNA, 20 nt, Artificial Sequence
  SAMD9L targeting guide sequence portion
cuuccacauaaguuuuuauu

SEQ ID NO: 7681 - RNA, 20 nt, Artificial Sequence
  SAMD9L targeting guide sequence portion
cuugguaucaauaaaaacuu

SEQ ID NO: 7682 - RNA, 20 nt, Artificial Sequence
  SAMD9L targeting guide sequence portion
gaacaauauauuuaccuucc

SEQ ID NO: 7683 - RNA, 20 nt, Artificial Sequence
  SAMD9L targeting guide sequence portion
ggaacaauauauuuaccuuc

SEQ ID NO: 7684 - RNA, 20 nt, Artificial Sequence
  SAMD9L targeting guide sequence portion
gguaucaauaaaaacuuaug

SEQ ID NO: 7685 - RNA, 20 nt, Artificial Sequence
  SAMD9L targeting guide sequence portion
guaucaauaaaaacuuaugu

SEQ ID NO: 7686 - RNA, 20 nt, Artificial Sequence
  SAMD9L targeting guide sequence portion
uaaaaacuuauguggaaggu

SEQ ID NO: 7687 - RNA, 20 nt, Artificial Sequence
  SAMD9L targeting guide sequence portion
uaaguuuuuauugauaccaa

SEQ ID NO: 7688 - RNA, 20 nt, Artificial Sequence
  SAMD9L targeting guide sequence portion
uaccuuccacauaaguuuuu

SEQ ID NO: 7689 - RNA, 20 nt, Artificial Sequence
  SAMD9L targeting guide sequence portion
uauauuuaccuuccacauaa

SEQ ID NO: 7690 - RNA, 20 nt, Artificial Sequence
  SAMD9L targeting guide sequence portion
uaucaauaaaaacuuaugug

SEQ ID NO: 7691 - RNA, 20 nt, Artificial Sequence
  SAMD9L targeting guide sequence portion
uauguggaagguaaauauau

SEQ ID NO: 7692 - RNA, 20 nt, Artificial Sequence
  SAMD9L targeting guide sequence portion
uauuuaccuuccacauaagu

SEQ ID NO: 7693 - RNA, 20 nt, Artificial Sequence
  SAMD9L targeting guide sequence portion
ucaauaaaaacuuaugugga

SEQ ID NO: 7694 - RNA, 20 nt, Artificial Sequence
  SAMD9L targeting guide sequence portion
ucaucuugguaucaauaaaa

SEQ ID NO: 7695 - RNA, 20 nt, Artificial Sequence
  SAMD9L targeting guide sequence portion
uccacauaaguuuuuauuga

SEQ ID NO: 7696 - RNA, 20 nt, Artificial Sequence
  SAMD9L targeting guide sequence portion
ucuugguaucaauaaaaacu

SEQ ID NO: 7697 - RNA, 20 nt, Artificial Sequence
  SAMD9L targeting guide sequence portion
ugguaucaauaaaaacuuau

SEQ ID NO: 7698 - RNA, 20 nt, Artificial Sequence
  SAMD9L targeting guide sequence portion
uuaccuuccacauaaguuuu

SEQ ID NO: 7699 - RNA, 20 nt, Artificial Sequence
  SAMD9L targeting guide sequence portion
uuauguggaagguaaauaua

SEQ ID NO: 7700 - RNA, 20 nt, Artificial Sequence
  SAMD9L targeting guide sequence portion
uuccacauaaguuuuuauug

SEQ ID NO: 7701 - RNA, 20 nt, Artificial Sequence
  SAMD9L targeting guide sequence portion
uugguaucaauaaaaacuua

SEQ ID NO: 7702 - RNA, 20 nt, Artificial Sequence
  SAMD9L targeting guide sequence portion
uuuaccuuccacauaaguuu

SEQ ID NO: 7703 - RNA, 21 nt, Artificial Sequence
  SAMD9L targeting guide sequence portion
aaaaacuuauguggaagguaa

SEQ ID NO: 7704 - RNA, 21 nt, Artificial Sequence
  SAMD9L targeting guide sequence portion
aaaacuuauguggaagguaaa

SEQ ID NO: 7705 - RNA, 21 nt, Artificial Sequence
  SAMD9L targeting guide sequence portion
aaacuuauguggaagguaaau

SEQ ID NO: 7706 - RNA, 21 nt, Artificial Sequence
  SAMD9L targeting guide sequence portion
aacaauauauuuaccuuccac

SEQ ID NO: 7707 - RNA, 21 nt, Artificial Sequence
  SAMD9L targeting guide sequence portion
aacuuauguggaagguaaaua

SEQ ID NO: 7708 - RNA, 21 nt, Artificial Sequence
  SAMD9L targeting guide sequence portion
aaguuuuuauugauaccaaga

SEQ ID NO: 7709 - RNA, 21 nt, Artificial Sequence
  SAMD9L targeting guide sequence portion
aauaaaaacuuauguggaagg

SEQ ID NO: 7710 - RNA, 21 nt, Artificial Sequence
  SAMD9L targeting guide sequence portion
aauauauuuaccuuccacaua

SEQ ID NO: 7711 - RNA, 21 nt, Artificial Sequence
  SAMD9L targeting guide sequence portion
acaauauauuuaccuuccaca

SEQ ID NO: 7712 - RNA, 21 nt, Artificial Sequence
  SAMD9L targeting guide sequence portion
acauaaguuuuuauugauacc

SEQ ID NO: 7713 - RNA, 21 nt, Artificial Sequence
  SAMD9L targeting guide sequence portion
accucaucuugguaucaauaa

SEQ ID NO: 7714 - RNA, 21 nt, Artificial Sequence
  SAMD9L targeting guide sequence portion
accuuccacauaaguuuuuau

SEQ ID NO: 7715 - RNA, 21 nt, Artificial Sequence
  SAMD9L targeting guide sequence portion
acuuauguggaagguaaauau

SEQ ID NO: 7716 - RNA, 21 nt, Artificial Sequence
  SAMD9L targeting guide sequence portion
auaaaaacuuauguggaaggu

SEQ ID NO: 7717 - RNA, 21 nt, Artificial Sequence
  SAMD9L targeting guide sequence portion
auauauuuaccuuccacauaa

SEQ ID NO: 7718 - RNA, 21 nt, Artificial Sequence
  SAMD9L targeting guide sequence portion
auauuuaccuuccacauaagu

SEQ ID NO: 7719 - RNA, 21 nt, Artificial Sequence
  SAMD9L targeting guide sequence portion
aucaauaaaaacuuaugugga

SEQ ID NO: 7720 - RNA, 21 nt, Artificial Sequence
  SAMD9L targeting guide sequence portion
aucuugguaucaauaaaaacu

SEQ ID NO: 7721 - RNA, 21 nt, Artificial Sequence
  SAMD9L targeting guide sequence portion
auuuaccuuccacauaaguuu

SEQ ID NO: 7722 - RNA, 21 nt, Artificial Sequence
  SAMD9L targeting guide sequence portion
caauaaaaacuuauguggaag

SEQ ID NO: 7723 - RNA, 21 nt, Artificial Sequence
  SAMD9L targeting guide sequence portion
caauauauuuaccuuccacau

SEQ ID NO: 7724 - RNA, 21 nt, Artificial Sequence
  SAMD9L targeting guide sequence portion
cacauaaguuuuuauugauac

SEQ ID NO: 7725 - RNA, 21 nt, Artificial Sequence
  SAMD9L targeting guide sequence portion
cauaaguuuuuauugauacca

SEQ ID NO: 7726 - RNA, 21 nt, Artificial Sequence
  SAMD9L targeting guide sequence portion
caucuugguaucaauaaaaac

SEQ ID NO: 7727 - RNA, 21 nt, Artificial Sequence
  SAMD9L targeting guide sequence portion
ccacauaaguuuuuauugaua

SEQ ID NO: 7728 - RNA, 21 nt, Artificial Sequence
  SAMD9L targeting guide sequence portion
ccucaucuugguaucaauaaa

SEQ ID NO: 7729 - RNA, 21 nt, Artificial Sequence
  SAMD9L targeting guide sequence portion
ccuuccacauaaguuuuuauu

SEQ ID NO: 7730 - RNA, 21 nt, Artificial Sequence
  SAMD9L targeting guide sequence portion
cucaucuugguaucaauaaaa

SEQ ID NO: 7731 - RNA, 21 nt, Artificial Sequence
  SAMD9L targeting guide sequence portion
cuuauguggaagguaaauaua

SEQ ID NO: 7732 - RNA, 21 nt, Artificial Sequence
  SAMD9L targeting guide sequence portion
cuuccacauaaguuuuuauug

SEQ ID NO: 7733 - RNA, 21 nt, Artificial Sequence
  SAMD9L targeting guide sequence portion
cuugguaucaauaaaaacuua

SEQ ID NO: 7734 - RNA, 21 nt, Artificial Sequence
  SAMD9L targeting guide sequence portion
gaacaauauauuuaccuucca

SEQ ID NO: 7735 - RNA, 21 nt, Artificial Sequence
  SAMD9L targeting guide sequence portion
ggaacaauauauuuaccuucc

SEQ ID NO: 7736 - RNA, 21 nt, Artificial Sequence
  SAMD9L targeting guide sequence portion
gggaacaauauauuuaccuuc

SEQ ID NO: 7737 - RNA, 21 nt, Artificial Sequence
  SAMD9L targeting guide sequence portion
gguaucaauaaaaacuuaugu

SEQ ID NO: 7738 - RNA, 21 nt, Artificial Sequence
  SAMD9L targeting guide sequence portion
guaucaauaaaaacuuaugug

SEQ ID NO: 7739 - RNA, 21 nt, Artificial Sequence
  SAMD9L targeting guide sequence portion
uaaaaacuuauguggaaggua

SEQ ID NO: 7740 - RNA, 21 nt, Artificial Sequence
  SAMD9L targeting guide sequence portion
uaaguuuuuauugauaccaag

SEQ ID NO: 7741 - RNA, 21 nt, Artificial Sequence
  SAMD9L targeting guide sequence portion
uaccuuccacauaaguuuuua

SEQ ID NO: 7742 - RNA, 21 nt, Artificial Sequence
  SAMD9L targeting guide sequence portion
uauauuuaccuuccacauaag

SEQ ID NO: 7743 - RNA, 21 nt, Artificial Sequence
  SAMD9L targeting guide sequence portion
uaucaauaaaaacuuaugugg

SEQ ID NO: 7744 - RNA, 21 nt, Artificial Sequence
  SAMD9L targeting guide sequence portion
uauguggaagguaaauauauu

SEQ ID NO: 7745 - RNA, 21 nt, Artificial Sequence
  SAMD9L targeting guide sequence portion
uauuuaccuuccacauaaguu

SEQ ID NO: 7746 - RNA, 21 nt, Artificial Sequence
  SAMD9L targeting guide sequence portion
ucaauaaaaacuuauguggaa

SEQ ID NO: 7747 - RNA, 21 nt, Artificial Sequence
  SAMD9L targeting guide sequence portion
ucaucuugguaucaauaaaaa

SEQ ID NO: 7748 - RNA, 21 nt, Artificial Sequence
  SAMD9L targeting guide sequence portion
uccacauaaguuuuuauugau

SEQ ID NO: 7749 - RNA, 21 nt, Artificial Sequence
  SAMD9L targeting guide sequence portion
ucuugguaucaauaaaaacuu

SEQ ID NO: 7750 - RNA, 21 nt, Artificial Sequence
  SAMD9L targeting guide sequence portion
ugguaucaauaaaaacuuaug

SEQ ID NO: 7751 - RNA, 21 nt, Artificial Sequence
  SAMD9L targeting guide sequence portion
uuaccuuccacauaaguuuuu

SEQ ID NO: 7752 - RNA, 21 nt, Artificial Sequence
  SAMD9L targeting guide sequence portion
uuauguggaagguaaauauau

SEQ ID NO: 7753 - RNA, 21 nt, Artificial Sequence
  SAMD9L targeting guide sequence portion
uuccacauaaguuuuuauuga

SEQ ID NO: 7754 - RNA, 21 nt, Artificial Sequence
  SAMD9L targeting guide sequence portion
uuuaccuuccacauaaguuuu

SEQ ID NO: 7755 - RNA, 22 nt, Artificial Sequence
  SAMD9L targeting guide sequence portion
aaaaacuuauguggaagguaaa

SEQ ID NO: 7756 - RNA, 22 nt, Artificial Sequence
  SAMD9L targeting guide sequence portion
aaaacuuauguggaagguaaau

SEQ ID NO: 7757 - RNA, 22 nt, Artificial Sequence
  SAMD9L targeting guide sequence portion
aaacuuauguggaagguaaaua

SEQ ID NO: 7758 - RNA, 22 nt, Artificial Sequence
  SAMD9L targeting guide sequence portion
aacaauauauuuaccuuccaca

SEQ ID NO: 7759 - RNA, 22 nt, Artificial Sequence
  SAMD9L targeting guide sequence portion
aacuuauguggaagguaaauau

SEQ ID NO: 7760 - RNA, 22 nt, Artificial Sequence
  SAMD9L targeting guide sequence portion
aaguuuuuauugauaccaagau

SEQ ID NO: 7761 - RNA, 22 nt, Artificial Sequence
  SAMD9L targeting guide sequence portion
aauaaaaacuuauguggaaggu

SEQ ID NO: 7762 - RNA, 22 nt, Artificial Sequence
  SAMD9L targeting guide sequence portion
aauauauuuaccuuccacauaa

SEQ ID NO: 7763 - RNA, 22 nt, Artificial Sequence
  SAMD9L targeting guide sequence portion
acaauauauuuaccuuccacau

SEQ ID NO: 7764 - RNA, 22 nt, Artificial Sequence
  SAMD9L targeting guide sequence portion
acauaaguuuuuauugauacca

SEQ ID NO: 7765 - RNA, 22 nt, Artificial Sequence
  SAMD9L targeting guide sequence portion
accucaucuugguaucaauaaa

SEQ ID NO: 7766 - RNA, 22 nt, Artificial Sequence
  SAMD9L targeting guide sequence portion
accuuccacauaaguuuuuauu

SEQ ID NO: 7767 - RNA, 22 nt, Artificial Sequence
  SAMD9L targeting guide sequence portion
acuuauguggaagguaaauaua

SEQ ID NO: 7768 - RNA, 22 nt, Artificial Sequence
  SAMD9L targeting guide sequence portion
auaaaaacuuauguggaaggua

SEQ ID NO: 7769 - RNA, 22 nt, Artificial Sequence
  SAMD9L targeting guide sequence portion
auaaguuuuuauugauaccaag

SEQ ID NO: 7770 - RNA, 22 nt, Artificial Sequence
  SAMD9L targeting guide sequence portion
auauauuuaccuuccacauaag

SEQ ID NO: 7771 - RNA, 22 nt, Artificial Sequence
  SAMD9L targeting guide sequence portion
auauuuaccuuccacauaaguu

SEQ ID NO: 7772 - RNA, 22 nt, Artificial Sequence
  SAMD9L targeting guide sequence portion
aucaauaaaaacuuauguggaa

SEQ ID NO: 7773 - RNA, 22 nt, Artificial Sequence
  SAMD9L targeting guide sequence portion
aucuugguaucaauaaaaacuu

SEQ ID NO: 7774 - RNA, 22 nt, Artificial Sequence
  SAMD9L targeting guide sequence portion
auuuaccuuccacauaaguuuu

SEQ ID NO: 7775 - RNA, 22 nt, Artificial Sequence
  SAMD9L targeting guide sequence portion
caauaaaaacuuauguggaagg

SEQ ID NO: 7776 - RNA, 22 nt, Artificial Sequence
  SAMD9L targeting guide sequence portion
caauauauuuaccuuccacaua

SEQ ID NO: 7777 - RNA, 22 nt, Artificial Sequence
  SAMD9L targeting guide sequence portion
cacauaaguuuuuauugauacc

SEQ ID NO: 7778 - RNA, 22 nt, Artificial Sequence
  SAMD9L targeting guide sequence portion
cauaaguuuuuauugauaccaa

SEQ ID NO: 7779 - RNA, 22 nt, Artificial Sequence
  SAMD9L targeting guide sequence portion
caucuugguaucaauaaaaacu

SEQ ID NO: 7780 - RNA, 22 nt, Artificial Sequence
  SAMD9L targeting guide sequence portion
ccacauaaguuuuuauugauac

SEQ ID NO: 7781 - RNA, 22 nt, Artificial Sequence
  SAMD9L targeting guide sequence portion
ccucaucuugguaucaauaaaa

SEQ ID NO: 7782 - RNA, 22 nt, Artificial Sequence
  SAMD9L targeting guide sequence portion
ccuuccacauaaguuuuuauug

SEQ ID NO: 7783 - RNA, 22 nt, Artificial Sequence
  SAMD9L targeting guide sequence portion
cucaucuugguaucaauaaaaa

SEQ ID NO: 7784 - RNA, 22 nt, Artificial Sequence
  SAMD9L targeting guide sequence portion
cuuauguggaagguaaauauau

SEQ ID NO: 7785 - RNA, 22 nt, Artificial Sequence
  SAMD9L targeting guide sequence portion
cuuccacauaaguuuuuauuga

SEQ ID NO: 7786 - RNA, 22 nt, Artificial Sequence
  SAMD9L targeting guide sequence portion
cuugguaucaauaaaaacuuau

SEQ ID NO: 7787 - RNA, 22 nt, Artificial Sequence
  SAMD9L targeting guide sequence portion
gaacaauauauuuaccuuccac

SEQ ID NO: 7788 - RNA, 22 nt, Artificial Sequence
  SAMD9L targeting guide sequence portion
ggaacaauauauuuaccuucca

SEQ ID NO: 7789 - RNA, 22 nt, Artificial Sequence
  SAMD9L targeting guide sequence portion
gggaacaauauauuuaccuucc

SEQ ID NO: 7790 - RNA, 22 nt, Artificial Sequence
  SAMD9L targeting guide sequence portion
ggggaacaauauauuuaccuuc

SEQ ID NO: 7791 - RNA, 22 nt, Artificial Sequence
  SAMD9L targeting guide sequence portion
gguaucaauaaaaacuuaugug

SEQ ID NO: 7792 - RNA, 22 nt, Artificial Sequence
  SAMD9L targeting guide sequence portion
guaucaauaaaaacuuaugugg

SEQ ID NO: 7793 - RNA, 22 nt, Artificial Sequence
  SAMD9L targeting guide sequence portion
uaaaaacuuauguggaagguaa

SEQ ID NO: 7794 - RNA, 22 nt, Artificial Sequence
  SAMD9L targeting guide sequence portion
uaaguuuuuauugauaccaaga

SEQ ID NO: 7795 - RNA, 22 nt, Artificial Sequence
  SAMD9L targeting guide sequence portion
uaccucaucuugguaucaauaa

SEQ ID NO: 7796 - RNA, 22 nt, Artificial Sequence
  SAMD9L targeting guide sequence portion
uaccuuccacauaaguuuuuau

SEQ ID NO: 7797 - RNA, 22 nt, Artificial Sequence
  SAMD9L targeting guide sequence portion
uauauuuaccuuccacauaagu

SEQ ID NO: 7798 - RNA, 22 nt, Artificial Sequence
  SAMD9L targeting guide sequence portion
uaucaauaaaaacuuaugugga

SEQ ID NO: 7799 - RNA, 22 nt, Artificial Sequence
  SAMD9L targeting guide sequence portion
uauguggaagguaaauauauug

SEQ ID NO: 7800 - RNA, 22 nt, Artificial Sequence
  SAMD9L targeting guide sequence portion
uauuuaccuuccacauaaguuu

SEQ ID NO: 7801 - RNA, 22 nt, Artificial Sequence
  SAMD9L targeting guide sequence portion
ucaauaaaaacuuauguggaag

SEQ ID NO: 7802 - RNA, 22 nt, Artificial Sequence
  SAMD9L targeting guide sequence portion
ucaucuugguaucaauaaaaac

SEQ ID NO: 7803 - RNA, 22 nt, Artificial Sequence
  SAMD9L targeting guide sequence portion
uccacauaaguuuuuauugaua

SEQ ID NO: 7804 - RNA, 22 nt, Artificial Sequence
  SAMD9L targeting guide sequence portion
ucuugguaucaauaaaaacuua

SEQ ID NO: 7805 - RNA, 22 nt, Artificial Sequence
  SAMD9L targeting guide sequence portion
ugguaucaauaaaaacuuaugu

SEQ ID NO: 7806 - RNA, 22 nt, Artificial Sequence
  SAMD9L targeting guide sequence portion
uuaccuuccacauaaguuuuua

SEQ ID NO: 7807 - RNA, 22 nt, Artificial Sequence
  SAMD9L targeting guide sequence portion
uuauguggaagguaaauauauu

SEQ ID NO: 7808 - RNA, 22 nt, Artificial Sequence
  SAMD9L targeting guide sequence portion
uuccacauaaguuuuuauugau

SEQ ID NO: 7809 - RNA, 22 nt, Artificial Sequence
  SAMD9L targeting guide sequence portion
uugguaucaauaaaaacuuaug

SEQ ID NO: 7810 - RNA, 22 nt, Artificial Sequence
  SAMD9L targeting guide sequence portion
uuuaccuuccacauaaguuuuu

SEQ ID NO: 7811 - RNA, 20 nt, Artificial Sequence
  SAMD9L targeting guide sequence portion
aaaaacucauguggaaggua

SEQ ID NO: 7812 - RNA, 20 nt, Artificial Sequence
  SAMD9L targeting guide sequence portion
aaaacucauguggaagguaa

SEQ ID NO: 7813 - RNA, 20 nt, Artificial Sequence
  SAMD9L targeting guide sequence portion
aaacucauguggaagguaaa

SEQ ID NO: 7814 - RNA, 20 nt, Artificial Sequence
  SAMD9L targeting guide sequence portion
aacucauguggaagguaaau

SEQ ID NO: 7815 - RNA, 20 nt, Artificial Sequence
  SAMD9L targeting guide sequence portion
aauaaaaacucauguggaag

SEQ ID NO: 7816 - RNA, 20 nt, Artificial Sequence
  SAMD9L targeting guide sequence portion
acaugaguuuuuauugauac

SEQ ID NO: 7817 - RNA, 20 nt, Artificial Sequence
  SAMD9L targeting guide sequence portion
accuuccacaugaguuuuua

SEQ ID NO: 7818 - RNA, 20 nt, Artificial Sequence
  SAMD9L targeting guide sequence portion
acucauguggaagguaaaua

SEQ ID NO: 7819 - RNA, 20 nt, Artificial Sequence
  SAMD9L targeting guide sequence portion
auaaaaacucauguggaagg

SEQ ID NO: 7820 - RNA, 20 nt, Artificial Sequence
  SAMD9L targeting guide sequence portion
auauauuuaccuuccacaug

SEQ ID NO: 7821 - RNA, 20 nt, Artificial Sequence
  SAMD9L targeting guide sequence portion
auauuuaccuuccacaugag

SEQ ID NO: 7822 - RNA, 20 nt, Artificial Sequence
  SAMD9L targeting guide sequence portion
aucaauaaaaacucaugugg

SEQ ID NO: 7823 - RNA, 20 nt, Artificial Sequence
  SAMD9L targeting guide sequence portion
augaguuuuuauugauacca

SEQ ID NO: 7824 - RNA, 20 nt, Artificial Sequence
  SAMD9L targeting guide sequence portion
auuuaccuuccacaugaguu

SEQ ID NO: 7825 - RNA, 20 nt, Artificial Sequence
  SAMD9L targeting guide sequence portion
caauaaaaacucauguggaa

SEQ ID NO: 7826 - RNA, 20 nt, Artificial Sequence
  SAMD9L targeting guide sequence portion
cacaugaguuuuuauugaua

SEQ ID NO: 7827 - RNA, 20 nt, Artificial Sequence
  SAMD9L targeting guide sequence portion
caugaguuuuuauugauacc

SEQ ID NO: 7828 - RNA, 20 nt, Artificial Sequence
  SAMD9L targeting guide sequence portion
cauguggaagguaaauauau

SEQ ID NO: 7829 - RNA, 20 nt, Artificial Sequence
  SAMD9L targeting guide sequence portion
ccacaugaguuuuuauugau

SEQ ID NO: 7830 - RNA, 20 nt, Artificial Sequence
  SAMD9L targeting guide sequence portion
ccuuccacaugaguuuuuau

SEQ ID NO: 7831 - RNA, 20 nt, Artificial Sequence
  SAMD9L targeting guide sequence portion
cucauguggaagguaaauau

SEQ ID NO: 7832 - RNA, 20 nt, Artificial Sequence
  SAMD9L targeting guide sequence portion
cuuccacaugaguuuuuauu

SEQ ID NO: 7833 - RNA, 20 nt, Artificial Sequence
  SAMD9L targeting guide sequence portion
cuugguaucaauaaaaacuc

SEQ ID NO: 7834 - RNA, 20 nt, Artificial Sequence
  SAMD9L targeting guide sequence portion
gaguuuuuauugauaccaag

SEQ ID NO: 7835 - RNA, 20 nt, Artificial Sequence
  SAMD9L targeting guide sequence portion
gguaucaauaaaaacucaug

SEQ ID NO: 7836 - RNA, 20 nt, Artificial Sequence
  SAMD9L targeting guide sequence portion
guaucaauaaaaacucaugu

SEQ ID NO: 7837 - RNA, 20 nt, Artificial Sequence
  SAMD9L targeting guide sequence portion
uaaaaacucauguggaaggu

SEQ ID NO: 7838 - RNA, 20 nt, Artificial Sequence
  SAMD9L targeting guide sequence portion
uaccuuccacaugaguuuuu

SEQ ID NO: 7839 - RNA, 20 nt, Artificial Sequence
  SAMD9L targeting guide sequence portion
uauauuuaccuuccacauga

SEQ ID NO: 7840 - RNA, 20 nt, Artificial Sequence
  SAMD9L targeting guide sequence portion
uaucaauaaaaacucaugug

SEQ ID NO: 7841 - RNA, 20 nt, Artificial Sequence
  SAMD9L targeting guide sequence portion
uauuuaccuuccacaugagu

SEQ ID NO: 7842 - RNA, 20 nt, Artificial Sequence
  SAMD9L targeting guide sequence portion
ucaauaaaaacucaugugga

SEQ ID NO: 7843 - RNA, 20 nt, Artificial Sequence
  SAMD9L targeting guide sequence portion
ucauguggaagguaaauaua

SEQ ID NO: 7844 - RNA, 20 nt, Artificial Sequence
  SAMD9L targeting guide sequence portion
uccacaugaguuuuuauuga

SEQ ID NO: 7845 - RNA, 20 nt, Artificial Sequence
  SAMD9L targeting guide sequence portion
ugaguuuuuauugauaccaa

SEQ ID NO: 7846 - RNA, 20 nt, Artificial Sequence
  SAMD9L targeting guide sequence portion
ugguaucaauaaaaacucau

SEQ ID NO: 7847 - RNA, 20 nt, Artificial Sequence
  SAMD9L targeting guide sequence portion
uuaccuuccacaugaguuuu

SEQ ID NO: 7848 - RNA, 20 nt, Artificial Sequence
  SAMD9L targeting guide sequence portion
uuccacaugaguuuuuauug

SEQ ID NO: 7849 - RNA, 20 nt, Artificial Sequence
  SAMD9L targeting guide sequence portion
uugguaucaauaaaaacuca

SEQ ID NO: 7850 - RNA, 20 nt, Artificial Sequence
  SAMD9L targeting guide sequence portion
uuuaccuuccacaugaguuu

SEQ ID NO: 7851 - RNA, 21 nt, Artificial Sequence
  SAMD9L targeting guide sequence portion
aaaaacucauguggaagguaa

SEQ ID NO: 7852 - RNA, 21 nt, Artificial Sequence
  SAMD9L targeting guide sequence portion
aaaacucauguggaagguaaa

SEQ ID NO: 7853 - RNA, 21 nt, Artificial Sequence
  SAMD9L targeting guide sequence portion
aaacucauguggaagguaaau

SEQ ID NO: 7854 - RNA, 21 nt, Artificial Sequence
  SAMD9L targeting guide sequence portion
aacucauguggaagguaaaua

SEQ ID NO: 7855 - RNA, 21 nt, Artificial Sequence
  SAMD9L targeting guide sequence portion
aauaaaaacucauguggaagg

SEQ ID NO: 7856 - RNA, 21 nt, Artificial Sequence
  SAMD9L targeting guide sequence portion
aauauauuuaccuuccacaug

SEQ ID NO: 7857 - RNA, 21 nt, Artificial Sequence
  SAMD9L targeting guide sequence portion
acaugaguuuuuauugauacc

SEQ ID NO: 7858 - RNA, 21 nt, Artificial Sequence
  SAMD9L targeting guide sequence portion
accuuccacaugaguuuuuau

SEQ ID NO: 7859 - RNA, 21 nt, Artificial Sequence
  SAMD9L targeting guide sequence portion
acucauguggaagguaaauau

SEQ ID NO: 7860 - RNA, 21 nt, Artificial Sequence
  SAMD9L targeting guide sequence portion
auaaaaacucauguggaaggu

SEQ ID NO: 7861 - RNA, 21 nt, Artificial Sequence
  SAMD9L targeting guide sequence portion
auauauuuaccuuccacauga

SEQ ID NO: 7862 - RNA, 21 nt, Artificial Sequence
  SAMD9L targeting guide sequence portion
auauuuaccuuccacaugagu

SEQ ID NO: 7863 - RNA, 21 nt, Artificial Sequence
  SAMD9L targeting guide sequence portion
aucaauaaaaacucaugugga

SEQ ID NO: 7864 - RNA, 21 nt, Artificial Sequence
  SAMD9L targeting guide sequence portion
augaguuuuuauugauaccaa

SEQ ID NO: 7865 - RNA, 21 nt, Artificial Sequence
  SAMD9L targeting guide sequence portion
auuuaccuuccacaugaguuu

SEQ ID NO: 7866 - RNA, 21 nt, Artificial Sequence
  SAMD9L targeting guide sequence portion
caauaaaaacucauguggaag

SEQ ID NO: 7867 - RNA, 21 nt, Artificial Sequence
  SAMD9L targeting guide sequence portion
cacaugaguuuuuauugauac

SEQ ID NO: 7868 - RNA, 21 nt, Artificial Sequence
  SAMD9L targeting guide sequence portion
caugaguuuuuauugauacca

SEQ ID NO: 7869 - RNA, 21 nt, Artificial Sequence
  SAMD9L targeting guide sequence portion
cauguggaagguaaauauauu

SEQ ID NO: 7870 - RNA, 21 nt, Artificial Sequence
  SAMD9L targeting guide sequence portion
ccacaugaguuuuuauugaua

SEQ ID NO: 7871 - RNA, 21 nt, Artificial Sequence
  SAMD9L targeting guide sequence portion
ccuuccacaugaguuuuuauu

SEQ ID NO: 7872 - RNA, 21 nt, Artificial Sequence
  SAMD9L targeting guide sequence portion
cucauguggaagguaaauaua

SEQ ID NO: 7873 - RNA, 21 nt, Artificial Sequence
  SAMD9L targeting guide sequence portion
cuuccacaugaguuuuuauug

SEQ ID NO: 7874 - RNA, 21 nt, Artificial Sequence
  SAMD9L targeting guide sequence portion
cuugguaucaauaaaaacuca

SEQ ID NO: 7875 - RNA, 21 nt, Artificial Sequence
  SAMD9L targeting guide sequence portion
gaguuuuuauugauaccaaga

SEQ ID NO: 7876 - RNA, 21 nt, Artificial Sequence
  SAMD9L targeting guide sequence portion
gguaucaauaaaaacucaugu

SEQ ID NO: 7877 - RNA, 21 nt, Artificial Sequence
  SAMD9L targeting guide sequence portion
guaucaauaaaaacucaugug

SEQ ID NO: 7878 - RNA, 21 nt, Artificial Sequence
  SAMD9L targeting guide sequence portion
uaaaaacucauguggaaggua

SEQ ID NO: 7879 - RNA, 21 nt, Artificial Sequence
  SAMD9L targeting guide sequence portion
uaccuuccacaugaguuuuua

SEQ ID NO: 7880 - RNA, 21 nt, Artificial Sequence
  SAMD9L targeting guide sequence portion
uauauuuaccuuccacaugag

SEQ ID NO: 7881 - RNA, 21 nt, Artificial Sequence
  SAMD9L targeting guide sequence portion
uaucaauaaaaacucaugugg

SEQ ID NO: 7882 - RNA, 21 nt, Artificial Sequence
  SAMD9L targeting guide sequence portion
uauuuaccuuccacaugaguu

SEQ ID NO: 7883 - RNA, 21 nt, Artificial Sequence
  SAMD9L targeting guide sequence portion
ucaauaaaaacucauguggaa

SEQ ID NO: 7884 - RNA, 21 nt, Artificial Sequence
  SAMD9L targeting guide sequence portion
ucauguggaagguaaauauau

SEQ ID NO: 7885 - RNA, 21 nt, Artificial Sequence
  SAMD9L targeting guide sequence portion
uccacaugaguuuuuauugau

SEQ ID NO: 7886 - RNA, 21 nt, Artificial Sequence
  SAMD9L targeting guide sequence portion
ucuugguaucaauaaaaacuc

SEQ ID NO: 7887 - RNA, 21 nt, Artificial Sequence
  SAMD9L targeting guide sequence portion
ugaguuuuuauugauaccaag

SEQ ID NO: 7888 - RNA, 21 nt, Artificial Sequence
  SAMD9L targeting guide sequence portion
ugguaucaauaaaaacucaug

SEQ ID NO: 7889 - RNA, 21 nt, Artificial Sequence
  SAMD9L targeting guide sequence portion
uuaccuuccacaugaguuuuu

SEQ ID NO: 7890 - RNA, 21 nt, Artificial Sequence
  SAMD9L targeting guide sequence portion
uuccacaugaguuuuuauuga

SEQ ID NO: 7891 - RNA, 21 nt, Artificial Sequence
  SAMD9L targeting guide sequence portion
uugguaucaauaaaaacucau

SEQ ID NO: 7892 - RNA, 21 nt, Artificial Sequence
  SAMD9L targeting guide sequence portion
uuuaccuuccacaugaguuuu

SEQ ID NO: 7893 - RNA, 22 nt, Artificial Sequence
  SAMD9L targeting guide sequence portion
aaaaacucauguggaagguaaa

SEQ ID NO: 7894 - RNA, 22 nt, Artificial Sequence
  SAMD9L targeting guide sequence portion
aaaacucauguggaagguaaau

SEQ ID NO: 7895 - RNA, 22 nt, Artificial Sequence
  SAMD9L targeting guide sequence portion
aaacucauguggaagguaaaua

SEQ ID NO: 7896 - RNA, 22 nt, Artificial Sequence
  SAMD9L targeting guide sequence portion
aacucauguggaagguaaauau

SEQ ID NO: 7897 - RNA, 22 nt, Artificial Sequence
  SAMD9L targeting guide sequence portion
aauaaaaacucauguggaaggu

SEQ ID NO: 7898 - RNA, 22 nt, Artificial Sequence
  SAMD9L targeting guide sequence portion
aauauauuuaccuuccacauga

SEQ ID NO: 7899 - RNA, 22 nt, Artificial Sequence
  SAMD9L targeting guide sequence portion
acaugaguuuuuauugauacca

SEQ ID NO: 7900 - RNA, 22 nt, Artificial Sequence
  SAMD9L targeting guide sequence portion
accuuccacaugaguuuuuauu

SEQ ID NO: 7901 - RNA, 22 nt, Artificial Sequence
  SAMD9L targeting guide sequence portion
acucauguggaagguaaauaua

SEQ ID NO: 7902 - RNA, 22 nt, Artificial Sequence
  SAMD9L targeting guide sequence portion
auaaaaacucauguggaaggua

SEQ ID NO: 7903 - RNA, 22 nt, Artificial Sequence
  SAMD9L targeting guide sequence portion
auauauuuaccuuccacaugag

SEQ ID NO: 7904 - RNA, 22 nt, Artificial Sequence
  SAMD9L targeting guide sequence portion
auauuuaccuuccacaugaguu

SEQ ID NO: 7905 - RNA, 22 nt, Artificial Sequence
  SAMD9L targeting guide sequence portion
aucaauaaaaacucauguggaa

SEQ ID NO: 7906 - RNA, 22 nt, Artificial Sequence
  SAMD9L targeting guide sequence portion
aucuugguaucaauaaaaacuc

SEQ ID NO: 7907 - RNA, 22 nt, Artificial Sequence
  SAMD9L targeting guide sequence portion
augaguuuuuauugauaccaag

SEQ ID NO: 7908 - RNA, 22 nt, Artificial Sequence
  SAMD9L targeting guide sequence portion
auuuaccuuccacaugaguuuu

SEQ ID NO: 7909 - RNA, 22 nt, Artificial Sequence
  SAMD9L targeting guide sequence portion
caauaaaaacucauguggaagg

SEQ ID NO: 7910 - RNA, 22 nt, Artificial Sequence
  SAMD9L targeting guide sequence portion
caauauauuuaccuuccacaug

SEQ ID NO: 7911 - RNA, 22 nt, Artificial Sequence
  SAMD9L targeting guide sequence portion
cacaugaguuuuuauugauacc

SEQ ID NO: 7912 - RNA, 22 nt, Artificial Sequence
  SAMD9L targeting guide sequence portion
caugaguuuuuauugauaccaa

SEQ ID NO: 7913 - RNA, 22 nt, Artificial Sequence
  SAMD9L targeting guide sequence portion
cauguggaagguaaauauauug

SEQ ID NO: 7914 - RNA, 22 nt, Artificial Sequence
  SAMD9L targeting guide sequence portion
ccacaugaguuuuuauugauac

SEQ ID NO: 7915 - RNA, 22 nt, Artificial Sequence
  SAMD9L targeting guide sequence portion
ccuuccacaugaguuuuuauug

SEQ ID NO: 7916 - RNA, 22 nt, Artificial Sequence
  SAMD9L targeting guide sequence portion
cucauguggaagguaaauauau

SEQ ID NO: 7917 - RNA, 22 nt, Artificial Sequence
  SAMD9L targeting guide sequence portion
cuuccacaugaguuuuuauuga

SEQ ID NO: 7918 - RNA, 22 nt, Artificial Sequence
  SAMD9L targeting guide sequence portion
cuugguaucaauaaaaacucau

SEQ ID NO: 7919 - RNA, 22 nt, Artificial Sequence
  SAMD9L targeting guide sequence portion
gaguuuuuauugauaccaagau

SEQ ID NO: 7920 - RNA, 22 nt, Artificial Sequence
  SAMD9L targeting guide sequence portion
gguaucaauaaaaacucaugug

SEQ ID NO: 7921 - RNA, 22 nt, Artificial Sequence
  SAMD9L targeting guide sequence portion
guaucaauaaaaacucaugugg

SEQ ID NO: 7922 - RNA, 22 nt, Artificial Sequence
  SAMD9L targeting guide sequence portion
uaaaaacucauguggaagguaa

SEQ ID NO: 7923 - RNA, 22 nt, Artificial Sequence
  SAMD9L targeting guide sequence portion
uaccuuccacaugaguuuuuau

SEQ ID NO: 7924 - RNA, 22 nt, Artificial Sequence
  SAMD9L targeting guide sequence portion
uauauuuaccuuccacaugagu

SEQ ID NO: 7925 - RNA, 22 nt, Artificial Sequence
  SAMD9L targeting guide sequence portion
uaucaauaaaaacucaugugga

SEQ ID NO: 7926 - RNA, 22 nt, Artificial Sequence
  SAMD9L targeting guide sequence portion
uauuuaccuuccacaugaguuu

SEQ ID NO: 7927 - RNA, 22 nt, Artificial Sequence
  SAMD9L targeting guide sequence portion
ucaauaaaaacucauguggaag

SEQ ID NO: 7928 - RNA, 22 nt, Artificial Sequence
  SAMD9L targeting guide sequence portion
ucauguggaagguaaauauauu

SEQ ID NO: 7929 - RNA, 22 nt, Artificial Sequence
  SAMD9L targeting guide sequence portion
uccacaugaguuuuuauugaua

SEQ ID NO: 7930 - RNA, 22 nt, Artificial Sequence
  SAMD9L targeting guide sequence portion
ucuugguaucaauaaaaacuca

SEQ ID NO: 7931 - RNA, 22 nt, Artificial Sequence
  SAMD9L targeting guide sequence portion
ugaguuuuuauugauaccaaga

SEQ ID NO: 7932 - RNA, 22 nt, Artificial Sequence
  SAMD9L targeting guide sequence portion
ugguaucaauaaaaacucaugu

SEQ ID NO: 7933 - RNA, 22 nt, Artificial Sequence
  SAMD9L targeting guide sequence portion
uuaccuuccacaugaguuuuua

SEQ ID NO: 7934 - RNA, 22 nt, Artificial Sequence
  SAMD9L targeting guide sequence portion
uuccacaugaguuuuuauugau

SEQ ID NO: 7935 - RNA, 22 nt, Artificial Sequence
  SAMD9L targeting guide sequence portion
uugguaucaauaaaaacucaug

SEQ ID NO: 7936 - RNA, 22 nt, Artificial Sequence
  SAMD9L targeting guide sequence portion
uuuaccuuccacaugaguuuuu

SEQ ID NO: 7937 - RNA, 20 nt, Artificial Sequence
  SAMD9L targeting guide sequence portion
aaacguauuugaacuacagg

SEQ ID NO: 7938 - RNA, 20 nt, Artificial Sequence
  SAMD9L targeting guide sequence portion
aaauaaacguauuugaacua

SEQ ID NO: 7939 - RNA, 20 nt, Artificial Sequence
  SAMD9L targeting guide sequence portion
aacguauuugaacuacaggu

SEQ ID NO: 7940 - RNA, 20 nt, Artificial Sequence
  SAMD9L targeting guide sequence portion
aauaaacguauuugaacuac

SEQ ID NO: 7941 - RNA, 20 nt, Artificial Sequence
  SAMD9L targeting guide sequence portion
aauacaucaccuguaguuca

SEQ ID NO: 7942 - RNA, 20 nt, Artificial Sequence
  SAMD9L targeting guide sequence portion
acaucaccuguaguucaaau

SEQ ID NO: 7943 - RNA, 20 nt, Artificial Sequence
  SAMD9L targeting guide sequence portion
accuguaguucaaauacguu

SEQ ID NO: 7944 - RNA, 20 nt, Artificial Sequence
  SAMD9L targeting guide sequence portion
acguauuugaacuacaggug

SEQ ID NO: 7945 - RNA, 20 nt, Artificial Sequence
  SAMD9L targeting guide sequence portion
aguucaaauacguuuauuua

SEQ ID NO: 7946 - RNA, 20 nt, Artificial Sequence
  SAMD9L targeting guide sequence portion
auaaacguauuugaacuaca

SEQ ID NO: 7947 - RNA, 20 nt, Artificial Sequence
  SAMD9L targeting guide sequence portion
auaaauaaacguauuugaac

SEQ ID NO: 7948 - RNA, 20 nt, Artificial Sequence
  SAMD9L targeting guide sequence portion
auacaucaccuguaguucaa

SEQ ID NO: 7949 - RNA, 20 nt, Artificial Sequence
  SAMD9L targeting guide sequence portion
aucaccuguaguucaaauac

SEQ ID NO: 7950 - RNA, 20 nt, Artificial Sequence
  SAMD9L targeting guide sequence portion
caaauacguuuauuuauauc

SEQ ID NO: 7951 - RNA, 20 nt, Artificial Sequence
  SAMD9L targeting guide sequence portion
caauacaucaccuguaguuc

SEQ ID NO: 7952 - RNA, 20 nt, Artificial Sequence
  SAMD9L targeting guide sequence portion
caccuguaguucaaauacgu

SEQ ID NO: 7953 - RNA, 20 nt, Artificial Sequence
  SAMD9L targeting guide sequence portion
cauaaagauauaaauaaacg

SEQ ID NO: 7954 - RNA, 20 nt, Artificial Sequence
  SAMD9L targeting guide sequence portion
caucaccuguaguucaaaua

SEQ ID NO: 7955 - RNA, 20 nt, Artificial Sequence
  SAMD9L targeting guide sequence portion
ccuguaguucaaauacguuu

SEQ ID NO: 7956 - RNA, 20 nt, Artificial Sequence
  SAMD9L targeting guide sequence portion
cguauuugaacuacagguga

SEQ ID NO: 7957 - RNA, 20 nt, Artificial Sequence
  SAMD9L targeting guide sequence portion
cguuuauuuauaucuuuaug

SEQ ID NO: 7958 - RNA, 20 nt, Artificial Sequence
  SAMD9L targeting guide sequence portion
cuguaguucaaauacguuua

SEQ ID NO: 7959 - RNA, 20 nt, Artificial Sequence
  SAMD9L targeting guide sequence portion
gauauaaauaaacguauuug

SEQ ID NO: 7960 - RNA, 20 nt, Artificial Sequence
  SAMD9L targeting guide sequence portion
guaguucaaauacguuuauu

SEQ ID NO: 7961 - RNA, 20 nt, Artificial Sequence
  SAMD9L targeting guide sequence portion
guauuugaacuacaggugau

SEQ ID NO: 7962 - RNA, 20 nt, Artificial Sequence
  SAMD9L targeting guide sequence portion
guucaaauacguuuauuuau

SEQ ID NO: 7963 - RNA, 20 nt, Artificial Sequence
  SAMD9L targeting guide sequence portion
uaaacguauuugaacuacag

SEQ ID NO: 7964 - RNA, 20 nt, Artificial Sequence
  SAMD9L targeting guide sequence portion
uaaauaaacguauuugaacu

SEQ ID NO: 7965 - RNA, 20 nt, Artificial Sequence
  SAMD9L targeting guide sequence portion
uacaucaccuguaguucaaa

SEQ ID NO: 7966 - RNA, 20 nt, Artificial Sequence
  SAMD9L targeting guide sequence portion
uaguucaaauacguuuauuu

SEQ ID NO: 7967 - RNA, 20 nt, Artificial Sequence
  SAMD9L targeting guide sequence portion
ucaccuguaguucaaauacg

SEQ ID NO: 7968 - RNA, 20 nt, Artificial Sequence
  SAMD9L targeting guide sequence portion
uguaguucaaauacguuuau

SEQ ID NO: 7969 - RNA, 21 nt, Artificial Sequence
  SAMD9L targeting guide sequence portion
aaacguauuugaacuacaggu

SEQ ID NO: 7970 - RNA, 21 nt, Artificial Sequence
  SAMD9L targeting guide sequence portion
aaauaaacguauuugaacuac

SEQ ID NO: 7971 - RNA, 21 nt, Artificial Sequence
  SAMD9L targeting guide sequence portion
aacguauuugaacuacaggug

SEQ ID NO: 7972 - RNA, 21 nt, Artificial Sequence
  SAMD9L targeting guide sequence portion
aauaaacguauuugaacuaca

SEQ ID NO: 7973 - RNA, 21 nt, Artificial Sequence
  SAMD9L targeting guide sequence portion
aauacaucaccuguaguucaa

SEQ ID NO: 7974 - RNA, 21 nt, Artificial Sequence
  SAMD9L targeting guide sequence portion
acaauacaucaccuguaguuc

SEQ ID NO: 7975 - RNA, 21 nt, Artificial Sequence
  SAMD9L targeting guide sequence portion
acaucaccuguaguucaaaua

SEQ ID NO: 7976 - RNA, 21 nt, Artificial Sequence
  SAMD9L targeting guide sequence portion
accuguaguucaaauacguuu

SEQ ID NO: 7977 - RNA, 21 nt, Artificial Sequence
  SAMD9L targeting guide sequence portion
acguauuugaacuacagguga

SEQ ID NO: 7978 - RNA, 21 nt, Artificial Sequence
  SAMD9L targeting guide sequence portion
auaaacguauuugaacuacag

SEQ ID NO: 7979 - RNA, 21 nt, Artificial Sequence
  SAMD9L targeting guide sequence portion
auacaucaccuguaguucaaa

SEQ ID NO: 7980 - RNA, 21 nt, Artificial Sequence
  SAMD9L targeting guide sequence portion
aucaccuguaguucaaauacg

SEQ ID NO: 7981 - RNA, 21 nt, Artificial Sequence
  SAMD9L targeting guide sequence portion
caauacaucaccuguaguuca

SEQ ID NO: 7982 - RNA, 21 nt, Artificial Sequence
  SAMD9L targeting guide sequence portion
caccuguaguucaaauacguu

SEQ ID NO: 7983 - RNA, 21 nt, Artificial Sequence
  SAMD9L targeting guide sequence portion
caucaccuguaguucaaauac

SEQ ID NO: 7984 - RNA, 21 nt, Artificial Sequence
  SAMD9L targeting guide sequence portion
ccuguaguucaaauacguuua

SEQ ID NO: 7985 - RNA, 21 nt, Artificial Sequence
  SAMD9L targeting guide sequence portion
cguauuugaacuacaggugau

SEQ ID NO: 7986 - RNA, 21 nt, Artificial Sequence
  SAMD9L targeting guide sequence portion
cuguaguucaaauacguuuau

SEQ ID NO: 7987 - RNA, 21 nt, Artificial Sequence
  SAMD9L targeting guide sequence portion
guaguucaaauacguuuauuu

SEQ ID NO: 7988 - RNA, 21 nt, Artificial Sequence
  SAMD9L targeting guide sequence portion
guauuugaacuacaggugaug

SEQ ID NO: 7989 - RNA, 21 nt, Artificial Sequence
  SAMD9L targeting guide sequence portion
uaaacguauuugaacuacagg

SEQ ID NO: 7990 - RNA, 21 nt, Artificial Sequence
  SAMD9L targeting guide sequence portion
uacaucaccuguaguucaaau

SEQ ID NO: 7991 - RNA, 21 nt, Artificial Sequence
  SAMD9L targeting guide sequence portion
ucaccuguaguucaaauacgu

SEQ ID NO: 7992 - RNA, 21 nt, Artificial Sequence
  SAMD9L targeting guide sequence portion
uguaguucaaauacguuuauu

SEQ ID NO: 7993 - RNA, 22 nt, Artificial Sequence
  SAMD9L targeting guide sequence portion
aaacguauuugaacuacaggug

SEQ ID NO: 7994 - RNA, 22 nt, Artificial Sequence
  SAMD9L targeting guide sequence portion
aaauaaacguauuugaacuaca

SEQ ID NO: 7995 - RNA, 22 nt, Artificial Sequence
  SAMD9L targeting guide sequence portion
aacguauuugaacuacagguga

SEQ ID NO: 7996 - RNA, 22 nt, Artificial Sequence
  SAMD9L targeting guide sequence portion
aauaaacguauuugaacuacag

SEQ ID NO: 7997 - RNA, 22 nt, Artificial Sequence
  SAMD9L targeting guide sequence portion
aauacaucaccuguaguucaaa

SEQ ID NO: 7998 - RNA, 22 nt, Artificial Sequence
  SAMD9L targeting guide sequence portion
acaauacaucaccuguaguuca

SEQ ID NO: 7999 - RNA, 22 nt, Artificial Sequence
  SAMD9L targeting guide sequence portion
acaucaccuguaguucaaauac

SEQ ID NO: 8000 - RNA, 22 nt, Artificial Sequence
  SAMD9L targeting guide sequence portion
accuguaguucaaauacguuua

SEQ ID NO: 8001 - RNA, 22 nt, Artificial Sequence
  SAMD9L targeting guide sequence portion
acguauuugaacuacaggugau

SEQ ID NO: 8002 - RNA, 22 nt, Artificial Sequence
  SAMD9L targeting guide sequence portion
auaaacguauuugaacuacagg

SEQ ID NO: 8003 - RNA, 22 nt, Artificial Sequence
  SAMD9L targeting guide sequence portion
auacaucaccuguaguucaaau

SEQ ID NO: 8004 - RNA, 22 nt, Artificial Sequence
  SAMD9L targeting guide sequence portion
aucaccuguaguucaaauacgu

SEQ ID NO: 8005 - RNA, 22 nt, Artificial Sequence
  SAMD9L targeting guide sequence portion
caauacaucaccuguaguucaa

SEQ ID NO: 8006 - RNA, 22 nt, Artificial Sequence
  SAMD9L targeting guide sequence portion
caccuguaguucaaauacguuu

SEQ ID NO: 8007 - RNA, 22 nt, Artificial Sequence
  SAMD9L targeting guide sequence portion
caucaccuguaguucaaauacg

SEQ ID NO: 8008 - RNA, 22 nt, Artificial Sequence
  SAMD9L targeting guide sequence portion
ccuguaguucaaauacguuuau

SEQ ID NO: 8009 - RNA, 22 nt, Artificial Sequence
  SAMD9L targeting guide sequence portion
cguauuugaacuacaggugaug

SEQ ID NO: 8010 - RNA, 22 nt, Artificial Sequence
  SAMD9L targeting guide sequence portion
cuguaguucaaauacguuuauu

SEQ ID NO: 8011 - RNA, 22 nt, Artificial Sequence
  SAMD9L targeting guide sequence portion
gacaauacaucaccuguaguuc

SEQ ID NO: 8012 - RNA, 22 nt, Artificial Sequence
  SAMD9L targeting guide sequence portion
guaguucaaauacguuuauuua

SEQ ID NO: 8013 - RNA, 22 nt, Artificial Sequence
  SAMD9L targeting guide sequence portion
guauuugaacuacaggugaugu

SEQ ID NO: 8014 - RNA, 22 nt, Artificial Sequence
  SAMD9L targeting guide sequence portion
uaaacguauuugaacuacaggu

SEQ ID NO: 8015 - RNA, 22 nt, Artificial Sequence
  SAMD9L targeting guide sequence portion
uaaauaaacguauuugaacuac

SEQ ID NO: 8016 - RNA, 22 nt, Artificial Sequence
  SAMD9L targeting guide sequence portion
uacaucaccuguaguucaaaua

SEQ ID NO: 8017 - RNA, 22 nt, Artificial Sequence
  SAMD9L targeting guide sequence portion
ucaccuguaguucaaauacguu

SEQ ID NO: 8018 - RNA, 22 nt, Artificial Sequence
  SAMD9L targeting guide sequence portion
uguaguucaaauacguuuauuu

SEQ ID NO: 8019 - RNA, 20 nt, Artificial Sequence
  SAMD9L targeting guide sequence portion
aaacauauuugaacuacagg

SEQ ID NO: 8020 - RNA, 20 nt, Artificial Sequence
  SAMD9L targeting guide sequence portion
aacauauuugaacuacaggu

SEQ ID NO: 8021 - RNA, 20 nt, Artificial Sequence
  SAMD9L targeting guide sequence portion
aauaaacauauuugaacuac

SEQ ID NO: 8022 - RNA, 20 nt, Artificial Sequence
  SAMD9L targeting guide sequence portion
acauauuugaacuacaggug

SEQ ID NO: 8023 - RNA, 20 nt, Artificial Sequence
  SAMD9L targeting guide sequence portion
accuguaguucaaauauguu

SEQ ID NO: 8024 - RNA, 20 nt, Artificial Sequence
  SAMD9L targeting guide sequence portion
auaaacauauuugaacuaca

SEQ ID NO: 8025 - RNA, 20 nt, Artificial Sequence
  SAMD9L targeting guide sequence portion
auauuugaacuacaggugau

SEQ ID NO: 8026 - RNA, 20 nt, Artificial Sequence
  SAMD9L targeting guide sequence portion
aucaccuguaguucaaauau

SEQ ID NO: 8027 - RNA, 20 nt, Artificial Sequence
  SAMD9L targeting guide sequence portion
caccuguaguucaaauaugu

SEQ ID NO: 8028 - RNA, 20 nt, Artificial Sequence
  SAMD9L targeting guide sequence portion
cauauuugaacuacagguga

SEQ ID NO: 8029 - RNA, 20 nt, Artificial Sequence
  SAMD9L targeting guide sequence portion
ccuguaguucaaauauguuu

SEQ ID NO: 8030 - RNA, 20 nt, Artificial Sequence
  SAMD9L targeting guide sequence portion
cuguaguucaaauauguuua

SEQ ID NO: 8031 - RNA, 20 nt, Artificial Sequence
  SAMD9L targeting guide sequence portion
guaguucaaauauguuuauu

SEQ ID NO: 8032 - RNA, 20 nt, Artificial Sequence
  SAMD9L targeting guide sequence portion
uaaacauauuugaacuacag

SEQ ID NO: 8033 - RNA, 20 nt, Artificial Sequence
  SAMD9L targeting guide sequence portion
ucaccuguaguucaaauaug

SEQ ID NO: 8034 - RNA, 20 nt, Artificial Sequence
  SAMD9L targeting guide sequence portion
uguaguucaaauauguuuau

SEQ ID NO: 8035 - RNA, 21 nt, Artificial Sequence
  SAMD9L targeting guide sequence portion
aaacauauuugaacuacaggu

SEQ ID NO: 8036 - RNA, 21 nt, Artificial Sequence
  SAMD9L targeting guide sequence portion
aacauauuugaacuacaggug

SEQ ID NO: 8037 - RNA, 21 nt, Artificial Sequence
  SAMD9L targeting guide sequence portion
acauauuugaacuacagguga

SEQ ID NO: 8038 - RNA, 21 nt, Artificial Sequence
  SAMD9L targeting guide sequence portion
accuguaguucaaauauguuu

SEQ ID NO: 8039 - RNA, 21 nt, Artificial Sequence
  SAMD9L targeting guide sequence portion
auaaacauauuugaacuacag

SEQ ID NO: 8040 - RNA, 21 nt, Artificial Sequence
  SAMD9L targeting guide sequence portion
auauuugaacuacaggugaug

SEQ ID NO: 8041 - RNA, 21 nt, Artificial Sequence
  SAMD9L targeting guide sequence portion
aucaccuguaguucaaauaug

SEQ ID NO: 8042 - RNA, 21 nt, Artificial Sequence
  SAMD9L targeting guide sequence portion
caccuguaguucaaauauguu

SEQ ID NO: 8043 - RNA, 21 nt, Artificial Sequence
  SAMD9L targeting guide sequence portion
cauauuugaacuacaggugau

SEQ ID NO: 8044 - RNA, 21 nt, Artificial Sequence
  SAMD9L targeting guide sequence portion
caucaccuguaguucaaauau

SEQ ID NO: 8045 - RNA, 21 nt, Artificial Sequence
  SAMD9L targeting guide sequence portion
ccuguaguucaaauauguuua

SEQ ID NO: 8046 - RNA, 21 nt, Artificial Sequence
  SAMD9L targeting guide sequence portion
cuguaguucaaauauguuuau

SEQ ID NO: 8047 - RNA, 21 nt, Artificial Sequence
  SAMD9L targeting guide sequence portion
uaaacauauuugaacuacagg

SEQ ID NO: 8048 - RNA, 21 nt, Artificial Sequence
  SAMD9L targeting guide sequence portion
ucaccuguaguucaaauaugu

SEQ ID NO: 8049 - RNA, 22 nt, Artificial Sequence
  SAMD9L targeting guide sequence portion
aaacauauuugaacuacaggug

SEQ ID NO: 8050 - RNA, 22 nt, Artificial Sequence
  SAMD9L targeting guide sequence portion
aacauauuugaacuacagguga

SEQ ID NO: 8051 - RNA, 22 nt, Artificial Sequence
  SAMD9L targeting guide sequence portion
aauaaacauauuugaacuacag

SEQ ID NO: 8052 - RNA, 22 nt, Artificial Sequence
  SAMD9L targeting guide sequence portion
acauauuugaacuacaggugau

SEQ ID NO: 8053 - RNA, 22 nt, Artificial Sequence
  SAMD9L targeting guide sequence portion
acaucaccuguaguucaaauau

SEQ ID NO: 8054 - RNA, 22 nt, Artificial Sequence
  SAMD9L targeting guide sequence portion
accuguaguucaaauauguuua

SEQ ID NO: 8055 - RNA, 22 nt, Artificial Sequence
  SAMD9L targeting guide sequence portion
auaaacauauuugaacuacagg

SEQ ID NO: 8056 - RNA, 22 nt, Artificial Sequence
  SAMD9L targeting guide sequence portion
auauuugaacuacaggugaugu

SEQ ID NO: 8057 - RNA, 22 nt, Artificial Sequence
  SAMD9L targeting guide sequence portion
aucaccuguaguucaaauaugu

SEQ ID NO: 8058 - RNA, 22 nt, Artificial Sequence
  SAMD9L targeting guide sequence portion
caccuguaguucaaauauguuu

SEQ ID NO: 8059 - RNA, 22 nt, Artificial Sequence
  SAMD9L targeting guide sequence portion
cauauuugaacuacaggugaug

SEQ ID NO: 8060 - RNA, 22 nt, Artificial Sequence
  SAMD9L targeting guide sequence portion
caucaccuguaguucaaauaug

SEQ ID NO: 8061 - RNA, 22 nt, Artificial Sequence
  SAMD9L targeting guide sequence portion
ccuguaguucaaauauguuuau

SEQ ID NO: 8062 - RNA, 22 nt, Artificial Sequence
  SAMD9L targeting guide sequence portion
cuguaguucaaauauguuuauu

SEQ ID NO: 8063 - RNA, 22 nt, Artificial Sequence
  SAMD9L targeting guide sequence portion
uaaacauauuugaacuacaggu

SEQ ID NO: 8064 - RNA, 22 nt, Artificial Sequence
  SAMD9L targeting guide sequence portion
ucaccuguaguucaaauauguu

SEQ ID NO: 8065 - RNA, 20 nt, Artificial Sequence
  SAMD9L targeting guide sequence portion
aaaaaaugaagucaaagacc

SEQ ID NO: 8066 - RNA, 20 nt, Artificial Sequence
  SAMD9L targeting guide sequence portion
aaaaaugaagucaaagaccu

SEQ ID NO: 8067 - RNA, 20 nt, Artificial Sequence
  SAMD9L targeting guide sequence portion
aaaaugaagucaaagaccuc

SEQ ID NO: 8068 - RNA, 20 nt, Artificial Sequence
  SAMD9L targeting guide sequence portion
aaaugaagucaaagaccucc

SEQ ID NO: 8069 - RNA, 20 nt, Artificial Sequence
  SAMD9L targeting guide sequence portion
aaugaagucaaagaccuccu

SEQ ID NO: 8070 - RNA, 20 nt, Artificial Sequence
  SAMD9L targeting guide sequence portion
acaguggggauguguggaaa

SEQ ID NO: 8071 - RNA, 20 nt, Artificial Sequence
  SAMD9L targeting guide sequence portion
acgacgcaggaggucuuuga

SEQ ID NO: 8072 - RNA, 20 nt, Artificial Sequence
  SAMD9L targeting guide sequence portion
acgcaggaggucuuugacuu

SEQ ID NO: 8073 - RNA, 20 nt, Artificial Sequence
  SAMD9L targeting guide sequence portion
aggaggucuuugacuucauu

SEQ ID NO: 8074 - RNA, 20 nt, Artificial Sequence
  SAMD9L targeting guide sequence portion
aggucuuugacuucauuuuu

SEQ ID NO: 8075 - RNA, 20 nt, Artificial Sequence
  SAMD9L targeting guide sequence portion
aguggggauguguggaaaaa

SEQ ID NO: 8076 - RNA, 20 nt, Artificial Sequence
  SAMD9L targeting guide sequence portion
augaagucaaagaccuccug

SEQ ID NO: 8077 - RNA, 20 nt, Artificial Sequence
  SAMD9L targeting guide sequence portion
cacaguggggauguguggaa

SEQ ID NO: 8078 - RNA, 20 nt, Artificial Sequence
  SAMD9L targeting guide sequence portion
caggaggucuuugacuucau

SEQ ID NO: 8079 - RNA, 20 nt, Artificial Sequence
  SAMD9L targeting guide sequence portion
caguggggauguguggaaaa

SEQ ID NO: 8080 - RNA, 20 nt, Artificial Sequence
  SAMD9L targeting guide sequence portion
cgacgcaggaggucuuugac

SEQ ID NO: 8081 - RNA, 20 nt, Artificial Sequence
  SAMD9L targeting guide sequence portion
cgcaggaggucuuugacuuc

SEQ ID NO: 8082 - RNA, 20 nt, Artificial Sequence
  SAMD9L targeting guide sequence portion
gacgcaggaggucuuugacu

SEQ ID NO: 8083 - RNA, 20 nt, Artificial Sequence
  SAMD9L targeting guide sequence portion
gaggucuuugacuucauuuu

SEQ ID NO: 8084 - RNA, 20 nt, Artificial Sequence
  SAMD9L targeting guide sequence portion
gcaggaggucuuugacuuca

SEQ ID NO: 8085 - RNA, 20 nt, Artificial Sequence
  SAMD9L targeting guide sequence portion
ggaggucuuugacuucauuu

SEQ ID NO: 8086 - RNA, 20 nt, Artificial Sequence
  SAMD9L targeting guide sequence portion
ggucuuugacuucauuuuuu

SEQ ID NO: 8087 - RNA, 20 nt, Artificial Sequence
  SAMD9L targeting guide sequence portion
guggggauguguggaaaaaa

SEQ ID NO: 8088 - RNA, 21 nt, Artificial Sequence
  SAMD9L targeting guide sequence portion
aaaaaaugaagucaaagaccu

SEQ ID NO: 8089 - RNA, 21 nt, Artificial Sequence
  SAMD9L targeting guide sequence portion
aaaaaugaagucaaagaccuc

SEQ ID NO: 8090 - RNA, 21 nt, Artificial Sequence
  SAMD9L targeting guide sequence portion
aaaaugaagucaaagaccucc

SEQ ID NO: 8091 - RNA, 21 nt, Artificial Sequence
  SAMD9L targeting guide sequence portion
aaaugaagucaaagaccuccu

SEQ ID NO: 8092 - RNA, 21 nt, Artificial Sequence
  SAMD9L targeting guide sequence portion
aaugaagucaaagaccuccug

SEQ ID NO: 8093 - RNA, 21 nt, Artificial Sequence
  SAMD9L targeting guide sequence portion
acaguggggauguguggaaaa

SEQ ID NO: 8094 - RNA, 21 nt, Artificial Sequence
  SAMD9L targeting guide sequence portion
acgacgcaggaggucuuugac

SEQ ID NO: 8095 - RNA, 21 nt, Artificial Sequence
  SAMD9L targeting guide sequence portion
acgcaggaggucuuugacuuc

SEQ ID NO: 8096 - RNA, 21 nt, Artificial Sequence
  SAMD9L targeting guide sequence portion
aggaggucuuugacuucauuu

SEQ ID NO: 8097 - RNA, 21 nt, Artificial Sequence
  SAMD9L targeting guide sequence portion
aggucuuugacuucauuuuuu

SEQ ID NO: 8098 - RNA, 21 nt, Artificial Sequence
  SAMD9L targeting guide sequence portion
aguggggauguguggaaaaaa

SEQ ID NO: 8099 - RNA, 21 nt, Artificial Sequence
  SAMD9L targeting guide sequence portion
augaagucaaagaccuccugc

SEQ ID NO: 8100 - RNA, 21 nt, Artificial Sequence
  SAMD9L targeting guide sequence portion
cacaguggggauguguggaaa

SEQ ID NO: 8101 - RNA, 21 nt, Artificial Sequence
  SAMD9L targeting guide sequence portion
caggaggucuuugacuucauu

SEQ ID NO: 8102 - RNA, 21 nt, Artificial Sequence
  SAMD9L targeting guide sequence portion
caguggggauguguggaaaaa

SEQ ID NO: 8103 - RNA, 21 nt, Artificial Sequence
  SAMD9L targeting guide sequence portion
cgacgcaggaggucuuugacu

SEQ ID NO: 8104 - RNA, 21 nt, Artificial Sequence
  SAMD9L targeting guide sequence portion
cgcaggaggucuuugacuuca

SEQ ID NO: 8105 - RNA, 21 nt, Artificial Sequence
  SAMD9L targeting guide sequence portion
gacgacgcaggaggucuuuga

SEQ ID NO: 8106 - RNA, 21 nt, Artificial Sequence
  SAMD9L targeting guide sequence portion
gacgcaggaggucuuugacuu

SEQ ID NO: 8107 - RNA, 21 nt, Artificial Sequence
  SAMD9L targeting guide sequence portion
gaggucuuugacuucauuuuu

SEQ ID NO: 8108 - RNA, 21 nt, Artificial Sequence
  SAMD9L targeting guide sequence portion
gcacaguggggauguguggaa

SEQ ID NO: 8109 - RNA, 21 nt, Artificial Sequence
  SAMD9L targeting guide sequence portion
gcaggaggucuuugacuucau

SEQ ID NO: 8110 - RNA, 21 nt, Artificial Sequence
  SAMD9L targeting guide sequence portion
ggaggucuuugacuucauuuu

SEQ ID NO: 8111 - RNA, 22 nt, Artificial Sequence
  SAMD9L targeting guide sequence portion
aaaaaaugaagucaaagaccuc

SEQ ID NO: 8112 - RNA, 22 nt, Artificial Sequence
  SAMD9L targeting guide sequence portion
aaaaaugaagucaaagaccucc

SEQ ID NO: 8113 - RNA, 22 nt, Artificial Sequence
  SAMD9L targeting guide sequence portion
aaaaugaagucaaagaccuccu

SEQ ID NO: 8114 - RNA, 22 nt, Artificial Sequence
  SAMD9L targeting guide sequence portion
aaaugaagucaaagaccuccug

SEQ ID NO: 8115 - RNA, 22 nt, Artificial Sequence
  SAMD9L targeting guide sequence portion
aaugaagucaaagaccuccugc

SEQ ID NO: 8116 - RNA, 22 nt, Artificial Sequence
  SAMD9L targeting guide sequence portion
acaguggggauguguggaaaaa

SEQ ID NO: 8117 - RNA, 22 nt, Artificial Sequence
  SAMD9L targeting guide sequence portion
acgacgcaggaggucuuugacu

SEQ ID NO: 8118 - RNA, 22 nt, Artificial Sequence
  SAMD9L targeting guide sequence portion
acgcaggaggucuuugacuuca

SEQ ID NO: 8119 - RNA, 22 nt, Artificial Sequence
  SAMD9L targeting guide sequence portion
agacgacgcaggaggucuuuga

SEQ ID NO: 8120 - RNA, 22 nt, Artificial Sequence
  SAMD9L targeting guide sequence portion
aggaggucuuugacuucauuuu

SEQ ID NO: 8121 - RNA, 22 nt, Artificial Sequence
  SAMD9L targeting guide sequence portion
augaagucaaagaccuccugcg

SEQ ID NO: 8122 - RNA, 22 nt, Artificial Sequence
  SAMD9L targeting guide sequence portion
cacaguggggauguguggaaaa

SEQ ID NO: 8123 - RNA, 22 nt, Artificial Sequence
  SAMD9L targeting guide sequence portion
caggaggucuuugacuucauuu

SEQ ID NO: 8124 - RNA, 22 nt, Artificial Sequence
  SAMD9L targeting guide sequence portion
caguggggauguguggaaaaaa

SEQ ID NO: 8125 - RNA, 22 nt, Artificial Sequence
  SAMD9L targeting guide sequence portion
cgacgcaggaggucuuugacuu

SEQ ID NO: 8126 - RNA, 22 nt, Artificial Sequence
  SAMD9L targeting guide sequence portion
cgcaggaggucuuugacuucau

SEQ ID NO: 8127 - RNA, 22 nt, Artificial Sequence
  SAMD9L targeting guide sequence portion
gacgacgcaggaggucuuugac

SEQ ID NO: 8128 - RNA, 22 nt, Artificial Sequence
  SAMD9L targeting guide sequence portion
gacgcaggaggucuuugacuuc

SEQ ID NO: 8129 - RNA, 22 nt, Artificial Sequence
  SAMD9L targeting guide sequence portion
gaggucuuugacuucauuuuuu

SEQ ID NO: 8130 - RNA, 22 nt, Artificial Sequence
  SAMD9L targeting guide sequence portion
gcacaguggggauguguggaaa

SEQ ID NO: 8131 - RNA, 22 nt, Artificial Sequence
  SAMD9L targeting guide sequence portion
gcaggaggucuuugacuucauu

SEQ ID NO: 8132 - RNA, 22 nt, Artificial Sequence
  SAMD9L targeting guide sequence portion
ggaggucuuugacuucauuuuu

SEQ ID NO: 8133 - RNA, 22 nt, Artificial Sequence
  SAMD9L targeting guide sequence portion
ggcacaguggggauguguggaa

SEQ ID NO: 8134 - RNA, 20 nt, Artificial Sequence
  SAMD9L targeting guide sequence portion
aaaaaacugaagucaaagac

SEQ ID NO: 8135 - RNA, 20 nt, Artificial Sequence
  SAMD9L targeting guide sequence portion
aaaaacugaagucaaagacc

SEQ ID NO: 8136 - RNA, 20 nt, Artificial Sequence
  SAMD9L targeting guide sequence portion
aaaacugaagucaaagaccu

SEQ ID NO: 8137 - RNA, 20 nt, Artificial Sequence
  SAMD9L targeting guide sequence portion
aaacugaagucaaagaccuc

SEQ ID NO: 8138 - RNA, 20 nt, Artificial Sequence
  SAMD9L targeting guide sequence portion
aacugaagucaaagaccucc

SEQ ID NO: 8139 - RNA, 20 nt, Artificial Sequence
  SAMD9L targeting guide sequence portion
acugaagucaaagaccuccu

SEQ ID NO: 8140 - RNA, 20 nt, Artificial Sequence
  SAMD9L targeting guide sequence portion
aggaggucuuugacuucagu

SEQ ID NO: 8141 - RNA, 20 nt, Artificial Sequence
  SAMD9L targeting guide sequence portion
aggucuuugacuucaguuuu

SEQ ID NO: 8142 - RNA, 20 nt, Artificial Sequence
  SAMD9L targeting guide sequence portion
caggaggucuuugacuucag

SEQ ID NO: 8143 - RNA, 20 nt, Artificial Sequence
  SAMD9L targeting guide sequence portion
cugaagucaaagaccuccug

SEQ ID NO: 8144 - RNA, 20 nt, Artificial Sequence
  SAMD9L targeting guide sequence portion
gaggucuuugacuucaguuu

SEQ ID NO: 8145 - RNA, 20 nt, Artificial Sequence
  SAMD9L targeting guide sequence portion
ggaggucuuugacuucaguu

SEQ ID NO: 8146 - RNA, 20 nt, Artificial Sequence
  SAMD9L targeting guide sequence portion
ggucuuugacuucaguuuuu

SEQ ID NO: 8147 - RNA, 20 nt, Artificial Sequence
  SAMD9L targeting guide sequence portion
gucuuugacuucaguuuuuu

SEQ ID NO: 8148 - RNA, 21 nt, Artificial Sequence
  SAMD9L targeting guide sequence portion
aaaaaacugaagucaaagacc

SEQ ID NO: 8149 - RNA, 21 nt, Artificial Sequence
  SAMD9L targeting guide sequence portion
aaaaacugaagucaaagaccu

SEQ ID NO: 8150 - RNA, 21 nt, Artificial Sequence
  SAMD9L targeting guide sequence portion
aaaacugaagucaaagaccuc

SEQ ID NO: 8151 - RNA, 21 nt, Artificial Sequence
  SAMD9L targeting guide sequence portion
aaacugaagucaaagaccucc

SEQ ID NO: 8152 - RNA, 21 nt, Artificial Sequence
  SAMD9L targeting guide sequence portion
aacugaagucaaagaccuccu

SEQ ID NO: 8153 - RNA, 21 nt, Artificial Sequence
  SAMD9L targeting guide sequence portion
acugaagucaaagaccuccug

SEQ ID NO: 8154 - RNA, 21 nt, Artificial Sequence
  SAMD9L targeting guide sequence portion
aggaggucuuugacuucaguu

SEQ ID NO: 8155 - RNA, 21 nt, Artificial Sequence
  SAMD9L targeting guide sequence portion
aggucuuugacuucaguuuuu

SEQ ID NO: 8156 - RNA, 21 nt, Artificial Sequence
  SAMD9L targeting guide sequence portion
caggaggucuuugacuucagu

SEQ ID NO: 8157 - RNA, 21 nt, Artificial Sequence
  SAMD9L targeting guide sequence portion
cugaagucaaagaccuccugc

SEQ ID NO: 8158 - RNA, 21 nt, Artificial Sequence
  SAMD9L targeting guide sequence portion
gaggucuuugacuucaguuuu

SEQ ID NO: 8159 - RNA, 21 nt, Artificial Sequence
  SAMD9L targeting guide sequence portion
gcaggaggucuuugacuucag

SEQ ID NO: 8160 - RNA, 21 nt, Artificial Sequence
  SAMD9L targeting guide sequence portion
ggaggucuuugacuucaguuu

SEQ ID NO: 8161 - RNA, 21 nt, Artificial Sequence
  SAMD9L targeting guide sequence portion
ggucuuugacuucaguuuuuu

SEQ ID NO: 8162 - RNA, 22 nt, Artificial Sequence
  SAMD9L targeting guide sequence portion
aaaaaacugaagucaaagaccu

SEQ ID NO: 8163 - RNA, 22 nt, Artificial Sequence
  SAMD9L targeting guide sequence portion
aaaaacugaagucaaagaccuc

SEQ ID NO: 8164 - RNA, 22 nt, Artificial Sequence
  SAMD9L targeting guide sequence portion
aaaacugaagucaaagaccucc

SEQ ID NO: 8165 - RNA, 22 nt, Artificial Sequence
  SAMD9L targeting guide sequence portion
aaacugaagucaaagaccuccu

SEQ ID NO: 8166 - RNA, 22 nt, Artificial Sequence
  SAMD9L targeting guide sequence portion
aacugaagucaaagaccuccug

SEQ ID NO: 8167 - RNA, 22 nt, Artificial Sequence
  SAMD9L targeting guide sequence portion
acugaagucaaagaccuccugc

SEQ ID NO: 8168 - RNA, 22 nt, Artificial Sequence
  SAMD9L targeting guide sequence portion
aggaggucuuugacuucaguuu

SEQ ID NO: 8169 - RNA, 22 nt, Artificial Sequence
  SAMD9L targeting guide sequence portion
aggucuuugacuucaguuuuuu

SEQ ID NO: 8170 - RNA, 22 nt, Artificial Sequence
  SAMD9L targeting guide sequence portion
caggaggucuuugacuucaguu

SEQ ID NO: 8171 - RNA, 22 nt, Artificial Sequence
  SAMD9L targeting guide sequence portion
cgcaggaggucuuugacuucag

SEQ ID NO: 8172 - RNA, 22 nt, Artificial Sequence
  SAMD9L targeting guide sequence portion
cugaagucaaagaccuccugcg

SEQ ID NO: 8173 - RNA, 22 nt, Artificial Sequence
  SAMD9L targeting guide sequence portion
gaggucuuugacuucaguuuuu

SEQ ID NO: 8174 - RNA, 22 nt, Artificial Sequence
  SAMD9L targeting guide sequence portion
gcaggaggucuuugacuucagu

SEQ ID NO: 8175 - RNA, 22 nt, Artificial Sequence
  SAMD9L targeting guide sequence portion
ggaggucuuugacuucaguuuu

SEQ ID NO: 8176 - RNA, 20 nt, Artificial Sequence
  SAMD9L targeting guide sequence portion
aaaagcucuuuguuccuugg

SEQ ID NO: 8177 - RNA, 20 nt, Artificial Sequence
  SAMD9L targeting guide sequence portion
aaagagcuuuuggugccaaa

SEQ ID NO: 8178 - RNA, 20 nt, Artificial Sequence
  SAMD9L targeting guide sequence portion
aaagcucuuuguuccuugga

SEQ ID NO: 8179 - RNA, 20 nt, Artificial Sequence
  SAMD9L targeting guide sequence portion
aacaaagagcuuuuggugcc

SEQ ID NO: 8180 - RNA, 20 nt, Artificial Sequence
  SAMD9L targeting guide sequence portion
aacuuucuuccaaggaacaa

SEQ ID NO: 8181 - RNA, 20 nt, Artificial Sequence
  SAMD9L targeting guide sequence portion
aagagcuuuuggugccaaac

SEQ ID NO: 8182 - RNA, 20 nt, Artificial Sequence
  SAMD9L targeting guide sequence portion
aagcucuuuguuccuuggaa

SEQ ID NO: 8183 - RNA, 20 nt, Artificial Sequence
  SAMD9L targeting guide sequence portion
aaggaacaaagagcuuuugg

SEQ ID NO: 8184 - RNA, 20 nt, Artificial Sequence
  SAMD9L targeting guide sequence portion
aauuuccuucaguuuggcac

SEQ ID NO: 8185 - RNA, 20 nt, Artificial Sequence
  SAMD9L targeting guide sequence portion
acaaagagcuuuuggugcca

SEQ ID NO: 8186 - RNA, 20 nt, Artificial Sequence
  SAMD9L targeting guide sequence portion
accaaaagcucuuuguuccu

SEQ ID NO: 8187 - RNA, 20 nt, Artificial Sequence
  SAMD9L targeting guide sequence portion
acuuucuuccaaggaacaaa

SEQ ID NO: 8188 - RNA, 20 nt, Artificial Sequence
  SAMD9L targeting guide sequence portion
agagcuuuuggugccaaacu

SEQ ID NO: 8189 - RNA, 20 nt, Artificial Sequence
  SAMD9L targeting guide sequence portion
agcucuuuguuccuuggaag

SEQ ID NO: 8190 - RNA, 20 nt, Artificial Sequence
  SAMD9L targeting guide sequence portion
agcuuuuggugccaaacuga

SEQ ID NO: 8191 - RNA, 20 nt, Artificial Sequence
  SAMD9L targeting guide sequence portion
aggaacaaagagcuuuuggu

SEQ ID NO: 8192 - RNA, 20 nt, Artificial Sequence
  SAMD9L targeting guide sequence portion
aguuuggcaccaaaagcucu

SEQ ID NO: 8193 - RNA, 20 nt, Artificial Sequence
  SAMD9L targeting guide sequence portion
auuuccuucaguuuggcacc

SEQ ID NO: 8194 - RNA, 20 nt, Artificial Sequence
  SAMD9L targeting guide sequence portion
caaaagcucuuuguuccuug

SEQ ID NO: 8195 - RNA, 20 nt, Artificial Sequence
  SAMD9L targeting guide sequence portion
caaagagcuuuuggugccaa

SEQ ID NO: 8196 - RNA, 20 nt, Artificial Sequence
  SAMD9L targeting guide sequence portion
caaggaacaaagagcuuuug

SEQ ID NO: 8197 - RNA, 20 nt, Artificial Sequence
  SAMD9L targeting guide sequence portion
caauuuccuucaguuuggca

SEQ ID NO: 8198 - RNA, 20 nt, Artificial Sequence
  SAMD9L targeting guide sequence portion
caccaaaagcucuuuguucc

SEQ ID NO: 8199 - RNA, 20 nt, Artificial Sequence
  SAMD9L targeting guide sequence portion
caguuuggcaccaaaagcuc

SEQ ID NO: 8200 - RNA, 20 nt, Artificial Sequence
  SAMD9L targeting guide sequence portion
ccaaaagcucuuuguuccuu

SEQ ID NO: 8201 - RNA, 20 nt, Artificial Sequence
  SAMD9L targeting guide sequence portion
ccaaggaacaaagagcuuuu

SEQ ID NO: 8202 - RNA, 20 nt, Artificial Sequence
  SAMD9L targeting guide sequence portion
ccuucaguuuggcaccaaaa

SEQ ID NO: 8203 - RNA, 20 nt, Artificial Sequence
  SAMD9L targeting guide sequence portion
cuucaguuuggcaccaaaag

SEQ ID NO: 8204 - RNA, 20 nt, Artificial Sequence
  SAMD9L targeting guide sequence portion
cuuccaaggaacaaagagcu

SEQ ID NO: 8205 - RNA, 20 nt, Artificial Sequence
  SAMD9L targeting guide sequence portion
cuuucuuccaaggaacaaag

SEQ ID NO: 8206 - RNA, 20 nt, Artificial Sequence
  SAMD9L targeting guide sequence portion
cuuuuggugccaaacugaag

SEQ ID NO: 8207 - RNA, 20 nt, Artificial Sequence
  SAMD9L targeting guide sequence portion
gaacaaagagcuuuuggugc

SEQ ID NO: 8208 - RNA, 20 nt, Artificial Sequence
  SAMD9L targeting guide sequence portion
gagcuuuuggugccaaacug

SEQ ID NO: 8209 - RNA, 20 nt, Artificial Sequence
  SAMD9L targeting guide sequence portion
gcaccaaaagcucuuuguuc

SEQ ID NO: 8210 - RNA, 20 nt, Artificial Sequence
  SAMD9L targeting guide sequence portion
gcuuuuggugccaaacugaa

SEQ ID NO: 8211 - RNA, 20 nt, Artificial Sequence
  SAMD9L targeting guide sequence portion
ggaacaaagagcuuuuggug

SEQ ID NO: 8212 - RNA, 20 nt, Artificial Sequence
  SAMD9L targeting guide sequence portion
ggcaccaaaagcucuuuguu

SEQ ID NO: 8213 - RNA, 20 nt, Artificial Sequence
  SAMD9L targeting guide sequence portion
guuuggcaccaaaagcucuu

SEQ ID NO: 8214 - RNA, 20 nt, Artificial Sequence
  SAMD9L targeting guide sequence portion
ucaguuuggcaccaaaagcu

SEQ ID NO: 8215 - RNA, 20 nt, Artificial Sequence
  SAMD9L targeting guide sequence portion
uccaaggaacaaagagcuuu

SEQ ID NO: 8216 - RNA, 20 nt, Artificial Sequence
  SAMD9L targeting guide sequence portion
uccuucaguuuggcaccaaa

SEQ ID NO: 8217 - RNA, 20 nt, Artificial Sequence
  SAMD9L targeting guide sequence portion
ucuuccaaggaacaaagagc

SEQ ID NO: 8218 - RNA, 20 nt, Artificial Sequence
  SAMD9L targeting guide sequence portion
uggcaccaaaagcucuuugu

SEQ ID NO: 8219 - RNA, 20 nt, Artificial Sequence
  SAMD9L targeting guide sequence portion
uucaguuuggcaccaaaagc

SEQ ID NO: 8220 - RNA, 20 nt, Artificial Sequence
  SAMD9L targeting guide sequence portion
uuccaaggaacaaagagcuu

SEQ ID NO: 8221 - RNA, 20 nt, Artificial Sequence
  SAMD9L targeting guide sequence portion
uuccuucaguuuggcaccaa

SEQ ID NO: 8222 - RNA, 20 nt, Artificial Sequence
  SAMD9L targeting guide sequence portion
uucuuccaaggaacaaagag

SEQ ID NO: 8223 - RNA, 20 nt, Artificial Sequence
  SAMD9L targeting guide sequence portion
uuggcaccaaaagcucuuug

SEQ ID NO: 8224 - RNA, 20 nt, Artificial Sequence
  SAMD9L targeting guide sequence portion
uuuccuucaguuuggcacca

SEQ ID NO: 8225 - RNA, 20 nt, Artificial Sequence
  SAMD9L targeting guide sequence portion
uuucuuccaaggaacaaaga

SEQ ID NO: 8226 - RNA, 20 nt, Artificial Sequence
  SAMD9L targeting guide sequence portion
uuuggcaccaaaagcucuuu

SEQ ID NO: 8227 - RNA, 20 nt, Artificial Sequence
  SAMD9L targeting guide sequence portion
uuuuggugccaaacugaagg

SEQ ID NO: 8228 - RNA, 21 nt, Artificial Sequence
  SAMD9L targeting guide sequence portion
aaaagcucuuuguuccuugga

SEQ ID NO: 8229 - RNA, 21 nt, Artificial Sequence
  SAMD9L targeting guide sequence portion
aaagagcuuuuggugccaaac

SEQ ID NO: 8230 - RNA, 21 nt, Artificial Sequence
  SAMD9L targeting guide sequence portion
aaagcucuuuguuccuuggaa

SEQ ID NO: 8231 - RNA, 21 nt, Artificial Sequence
  SAMD9L targeting guide sequence portion
aacaaagagcuuuuggugcca

SEQ ID NO: 8232 - RNA, 21 nt, Artificial Sequence
  SAMD9L targeting guide sequence portion
aacuuucuuccaaggaacaaa

SEQ ID NO: 8233 - RNA, 21 nt, Artificial Sequence
  SAMD9L targeting guide sequence portion
aagagcuuuuggugccaaacu

SEQ ID NO: 8234 - RNA, 21 nt, Artificial Sequence
  SAMD9L targeting guide sequence portion
aagcucuuuguuccuuggaag

SEQ ID NO: 8235 - RNA, 21 nt, Artificial Sequence
  SAMD9L targeting guide sequence portion
aaggaacaaagagcuuuuggu

SEQ ID NO: 8236 - RNA, 21 nt, Artificial Sequence
  SAMD9L targeting guide sequence portion
aauuuccuucaguuuggcacc

SEQ ID NO: 8237 - RNA, 21 nt, Artificial Sequence
  SAMD9L targeting guide sequence portion
acaaagagcuuuuggugccaa

SEQ ID NO: 8238 - RNA, 21 nt, Artificial Sequence
  SAMD9L targeting guide sequence portion
accaaaagcucuuuguuccuu

SEQ ID NO: 8239 - RNA, 21 nt, Artificial Sequence
  SAMD9L targeting guide sequence portion
acuuucuuccaaggaacaaag

SEQ ID NO: 8240 - RNA, 21 nt, Artificial Sequence
  SAMD9L targeting guide sequence portion
agagcuuuuggugccaaacug

SEQ ID NO: 8241 - RNA, 21 nt, Artificial Sequence
  SAMD9L targeting guide sequence portion
agcucuuuguuccuuggaaga

SEQ ID NO: 8242 - RNA, 21 nt, Artificial Sequence
  SAMD9L targeting guide sequence portion
agcuuuuggugccaaacugaa

SEQ ID NO: 8243 - RNA, 21 nt, Artificial Sequence
  SAMD9L targeting guide sequence portion
aggaacaaagagcuuuuggug

SEQ ID NO: 8244 - RNA, 21 nt, Artificial Sequence
  SAMD9L targeting guide sequence portion
aguuuggcaccaaaagcucuu

SEQ ID NO: 8245 - RNA, 21 nt, Artificial Sequence
  SAMD9L targeting guide sequence portion
auuuccuucaguuuggcacca

SEQ ID NO: 8246 - RNA, 21 nt, Artificial Sequence
  SAMD9L targeting guide sequence portion
caaaagcucuuuguuccuugg

SEQ ID NO: 8247 - RNA, 21 nt, Artificial Sequence
  SAMD9L targeting guide sequence portion
caaagagcuuuuggugccaaa

SEQ ID NO: 8248 - RNA, 21 nt, Artificial Sequence
  SAMD9L targeting guide sequence portion
caacuuucuuccaaggaacaa

SEQ ID NO: 8249 - RNA, 21 nt, Artificial Sequence
  SAMD9L targeting guide sequence portion
caaggaacaaagagcuuuugg

SEQ ID NO: 8250 - RNA, 21 nt, Artificial Sequence
  SAMD9L targeting guide sequence portion
caauuuccuucaguuuggcac

SEQ ID NO: 8251 - RNA, 21 nt, Artificial Sequence
  SAMD9L targeting guide sequence portion
caccaaaagcucuuuguuccu

SEQ ID NO: 8252 - RNA, 21 nt, Artificial Sequence
  SAMD9L targeting guide sequence portion
caguuuggcaccaaaagcucu

SEQ ID NO: 8253 - RNA, 21 nt, Artificial Sequence
  SAMD9L targeting guide sequence portion
ccaaaagcucuuuguuccuug

SEQ ID NO: 8254 - RNA, 21 nt, Artificial Sequence
  SAMD9L targeting guide sequence portion
ccaaggaacaaagagcuuuug

SEQ ID NO: 8255 - RNA, 21 nt, Artificial Sequence
  SAMD9L targeting guide sequence portion
ccuucaguuuggcaccaaaag

SEQ ID NO: 8256 - RNA, 21 nt, Artificial Sequence
  SAMD9L targeting guide sequence portion
cuucaguuuggcaccaaaagc

SEQ ID NO: 8257 - RNA, 21 nt, Artificial Sequence
  SAMD9L targeting guide sequence portion
cuuccaaggaacaaagagcuu

SEQ ID NO: 8258 - RNA, 21 nt, Artificial Sequence
  SAMD9L targeting guide sequence portion
cuuucuuccaaggaacaaaga

SEQ ID NO: 8259 - RNA, 21 nt, Artificial Sequence
  SAMD9L targeting guide sequence portion
cuuuuggugccaaacugaagg

SEQ ID NO: 8260 - RNA, 21 nt, Artificial Sequence
  SAMD9L targeting guide sequence portion
gaacaaagagcuuuuggugcc

SEQ ID NO: 8261 - RNA, 21 nt, Artificial Sequence
  SAMD9L targeting guide sequence portion
gagcuuuuggugccaaacuga

SEQ ID NO: 8262 - RNA, 21 nt, Artificial Sequence
  SAMD9L targeting guide sequence portion
gcaccaaaagcucuuuguucc

SEQ ID NO: 8263 - RNA, 21 nt, Artificial Sequence
  SAMD9L targeting guide sequence portion
gcuuuuggugccaaacugaag

SEQ ID NO: 8264 - RNA, 21 nt, Artificial Sequence
  SAMD9L targeting guide sequence portion
ggaacaaagagcuuuuggugc

SEQ ID NO: 8265 - RNA, 21 nt, Artificial Sequence
  SAMD9L targeting guide sequence portion
ggcaccaaaagcucuuuguuc

SEQ ID NO: 8266 - RNA, 21 nt, Artificial Sequence
  SAMD9L targeting guide sequence portion
guuuggcaccaaaagcucuuu

SEQ ID NO: 8267 - RNA, 21 nt, Artificial Sequence
  SAMD9L targeting guide sequence portion
ucaauuuccuucaguuuggca

SEQ ID NO: 8268 - RNA, 21 nt, Artificial Sequence
  SAMD9L targeting guide sequence portion
ucaguuuggcaccaaaagcuc

SEQ ID NO: 8269 - RNA, 21 nt, Artificial Sequence
  SAMD9L targeting guide sequence portion
uccaaggaacaaagagcuuuu

SEQ ID NO: 8270 - RNA, 21 nt, Artificial Sequence
  SAMD9L targeting guide sequence portion
uccuucaguuuggcaccaaaa

SEQ ID NO: 8271 - RNA, 21 nt, Artificial Sequence
  SAMD9L targeting guide sequence portion
ucuuccaaggaacaaagagcu

SEQ ID NO: 8272 - RNA, 21 nt, Artificial Sequence
  SAMD9L targeting guide sequence portion
uggcaccaaaagcucuuuguu

SEQ ID NO: 8273 - RNA, 21 nt, Artificial Sequence
  SAMD9L targeting guide sequence portion
uucaguuuggcaccaaaagcu

SEQ ID NO: 8274 - RNA, 21 nt, Artificial Sequence
  SAMD9L targeting guide sequence portion
uuccaaggaacaaagagcuuu

SEQ ID NO: 8275 - RNA, 21 nt, Artificial Sequence
  SAMD9L targeting guide sequence portion
uuccuucaguuuggcaccaaa

SEQ ID NO: 8276 - RNA, 21 nt, Artificial Sequence
  SAMD9L targeting guide sequence portion
uucuuccaaggaacaaagagc

SEQ ID NO: 8277 - RNA, 21 nt, Artificial Sequence
  SAMD9L targeting guide sequence portion
uuggcaccaaaagcucuuugu

SEQ ID NO: 8278 - RNA, 21 nt, Artificial Sequence
  SAMD9L targeting guide sequence portion
uuuccuucaguuuggcaccaa

SEQ ID NO: 8279 - RNA, 21 nt, Artificial Sequence
  SAMD9L targeting guide sequence portion
uuucuuccaaggaacaaagag

SEQ ID NO: 8280 - RNA, 21 nt, Artificial Sequence
  SAMD9L targeting guide sequence portion
uuuggcaccaaaagcucuuug

SEQ ID NO: 8281 - RNA, 21 nt, Artificial Sequence
  SAMD9L targeting guide sequence portion
uuuuggugccaaacugaagga

SEQ ID NO: 8282 - RNA, 22 nt, Artificial Sequence
  SAMD9L targeting guide sequence portion
aaaagcucuuuguuccuuggaa

SEQ ID NO: 8283 - RNA, 22 nt, Artificial Sequence
  SAMD9L targeting guide sequence portion
aaagagcuuuuggugccaaacu

SEQ ID NO: 8284 - RNA, 22 nt, Artificial Sequence
  SAMD9L targeting guide sequence portion
aaagcucuuuguuccuuggaag

SEQ ID NO: 8285 - RNA, 22 nt, Artificial Sequence
  SAMD9L targeting guide sequence portion
aacaaagagcuuuuggugccaa

SEQ ID NO: 8286 - RNA, 22 nt, Artificial Sequence
  SAMD9L targeting guide sequence portion
aacuuucuuccaaggaacaaag

SEQ ID NO: 8287 - RNA, 22 nt, Artificial Sequence
  SAMD9L targeting guide sequence portion
aagagcuuuuggugccaaacug

SEQ ID NO: 8288 - RNA, 22 nt, Artificial Sequence
  SAMD9L targeting guide sequence portion
aagcucuuuguuccuuggaaga

SEQ ID NO: 8289 - RNA, 22 nt, Artificial Sequence
  SAMD9L targeting guide sequence portion
aaggaacaaagagcuuuuggug

SEQ ID NO: 8290 - RNA, 22 nt, Artificial Sequence
  SAMD9L targeting guide sequence portion
aauuuccuucaguuuggcacca

SEQ ID NO: 8291 - RNA, 22 nt, Artificial Sequence
  SAMD9L targeting guide sequence portion
acaaagagcuuuuggugccaaa

SEQ ID NO: 8292 - RNA, 22 nt, Artificial Sequence
  SAMD9L targeting guide sequence portion
accaaaagcucuuuguuccuug

SEQ ID NO: 8293 - RNA, 22 nt, Artificial Sequence
  SAMD9L targeting guide sequence portion
acuuucuuccaaggaacaaaga

SEQ ID NO: 8294 - RNA, 22 nt, Artificial Sequence
  SAMD9L targeting guide sequence portion
agagcuuuuggugccaaacuga

SEQ ID NO: 8295 - RNA, 22 nt, Artificial Sequence
  SAMD9L targeting guide sequence portion
agcucuuuguuccuuggaagaa

SEQ ID NO: 8296 - RNA, 22 nt, Artificial Sequence
  SAMD9L targeting guide sequence portion
agcuuuuggugccaaacugaag

SEQ ID NO: 8297 - RNA, 22 nt, Artificial Sequence
  SAMD9L targeting guide sequence portion
aggaacaaagagcuuuuggugc

SEQ ID NO: 8298 - RNA, 22 nt, Artificial Sequence
  SAMD9L targeting guide sequence portion
aguuuggcaccaaaagcucuuu

SEQ ID NO: 8299 - RNA, 22 nt, Artificial Sequence
  SAMD9L targeting guide sequence portion
auuuccuucaguuuggcaccaa

SEQ ID NO: 8300 - RNA, 22 nt, Artificial Sequence
  SAMD9L targeting guide sequence portion
caaaagcucuuuguuccuugga

SEQ ID NO: 8301 - RNA, 22 nt, Artificial Sequence
  SAMD9L targeting guide sequence portion
caaagagcuuuuggugccaaac

SEQ ID NO: 8302 - RNA, 22 nt, Artificial Sequence
  SAMD9L targeting guide sequence portion
caacuuucuuccaaggaacaaa

SEQ ID NO: 8303 - RNA, 22 nt, Artificial Sequence
  SAMD9L targeting guide sequence portion
caaggaacaaagagcuuuuggu

SEQ ID NO: 8304 - RNA, 22 nt, Artificial Sequence
  SAMD9L targeting guide sequence portion
caauuuccuucaguuuggcacc

SEQ ID NO: 8305 - RNA, 22 nt, Artificial Sequence
  SAMD9L targeting guide sequence portion
caccaaaagcucuuuguuccuu

SEQ ID NO: 8306 - RNA, 22 nt, Artificial Sequence
  SAMD9L targeting guide sequence portion
caguuuggcaccaaaagcucuu

SEQ ID NO: 8307 - RNA, 22 nt, Artificial Sequence
  SAMD9L targeting guide sequence portion
ccaaaagcucuuuguuccuugg

SEQ ID NO: 8308 - RNA, 22 nt, Artificial Sequence
  SAMD9L targeting guide sequence portion
ccaacuuucuuccaaggaacaa

SEQ ID NO: 8309 - RNA, 22 nt, Artificial Sequence
  SAMD9L targeting guide sequence portion
ccaaggaacaaagagcuuuugg

SEQ ID NO: 8310 - RNA, 22 nt, Artificial Sequence
  SAMD9L targeting guide sequence portion
ccuucaguuuggcaccaaaagc

SEQ ID NO: 8311 - RNA, 22 nt, Artificial Sequence
  SAMD9L targeting guide sequence portion
cuucaguuuggcaccaaaagcu

SEQ ID NO: 8312 - RNA, 22 nt, Artificial Sequence
  SAMD9L targeting guide sequence portion
cuuccaaggaacaaagagcuuu

SEQ ID NO: 8313 - RNA, 22 nt, Artificial Sequence
  SAMD9L targeting guide sequence portion
cuuucuuccaaggaacaaagag

SEQ ID NO: 8314 - RNA, 22 nt, Artificial Sequence
  SAMD9L targeting guide sequence portion
cuuuuggugccaaacugaagga

SEQ ID NO: 8315 - RNA, 22 nt, Artificial Sequence
  SAMD9L targeting guide sequence portion
gaacaaagagcuuuuggugcca

SEQ ID NO: 8316 - RNA, 22 nt, Artificial Sequence
  SAMD9L targeting guide sequence portion
gagcuuuuggugccaaacugaa

SEQ ID NO: 8317 - RNA, 22 nt, Artificial Sequence
  SAMD9L targeting guide sequence portion
gcaccaaaagcucuuuguuccu

SEQ ID NO: 8318 - RNA, 22 nt, Artificial Sequence
  SAMD9L targeting guide sequence portion
gcuuuuggugccaaacugaagg

SEQ ID NO: 8319 - RNA, 22 nt, Artificial Sequence
  SAMD9L targeting guide sequence portion
ggaacaaagagcuuuuggugcc

SEQ ID NO: 8320 - RNA, 22 nt, Artificial Sequence
  SAMD9L targeting guide sequence portion
ggcaccaaaagcucuuuguucc

SEQ ID NO: 8321 - RNA, 22 nt, Artificial Sequence
  SAMD9L targeting guide sequence portion
guuuggcaccaaaagcucuuug

SEQ ID NO: 8322 - RNA, 22 nt, Artificial Sequence
  SAMD9L targeting guide sequence portion
ucaauuuccuucaguuuggcac

SEQ ID NO: 8323 - RNA, 22 nt, Artificial Sequence
  SAMD9L targeting guide sequence portion
ucaguuuggcaccaaaagcucu

SEQ ID NO: 8324 - RNA, 22 nt, Artificial Sequence
  SAMD9L targeting guide sequence portion
uccaaggaacaaagagcuuuug

SEQ ID NO: 8325 - RNA, 22 nt, Artificial Sequence
  SAMD9L targeting guide sequence portion
uccuucaguuuggcaccaaaag

SEQ ID NO: 8326 - RNA, 22 nt, Artificial Sequence
  SAMD9L targeting guide sequence portion
ucuuccaaggaacaaagagcuu

SEQ ID NO: 8327 - RNA, 22 nt, Artificial Sequence
  SAMD9L targeting guide sequence portion
uggcaccaaaagcucuuuguuc

SEQ ID NO: 8328 - RNA, 22 nt, Artificial Sequence
  SAMD9L targeting guide sequence portion
uucaauuuccuucaguuuggca

SEQ ID NO: 8329 - RNA, 22 nt, Artificial Sequence
  SAMD9L targeting guide sequence portion
uucaguuuggcaccaaaagcuc

SEQ ID NO: 8330 - RNA, 22 nt, Artificial Sequence
  SAMD9L targeting guide sequence portion
uuccaaggaacaaagagcuuuu

SEQ ID NO: 8331 - RNA, 22 nt, Artificial Sequence
  SAMD9L targeting guide sequence portion
uuccuucaguuuggcaccaaaa

SEQ ID NO: 8332 - RNA, 22 nt, Artificial Sequence
  SAMD9L targeting guide sequence portion
uucuuccaaggaacaaagagcu

SEQ ID NO: 8333 - RNA, 22 nt, Artificial Sequence
  SAMD9L targeting guide sequence portion
uuggcaccaaaagcucuuuguu

SEQ ID NO: 8334 - RNA, 22 nt, Artificial Sequence
  SAMD9L targeting guide sequence portion
uuuccuucaguuuggcaccaaa

SEQ ID NO: 8335 - RNA, 22 nt, Artificial Sequence
  SAMD9L targeting guide sequence portion
uuucuuccaaggaacaaagagc

SEQ ID NO: 8336 - RNA, 22 nt, Artificial Sequence
  SAMD9L targeting guide sequence portion
uuuggcaccaaaagcucuuugu

SEQ ID NO: 8337 - RNA, 22 nt, Artificial Sequence
  SAMD9L targeting guide sequence portion
uuuuggugccaaacugaaggaa

SEQ ID NO: 8338 - RNA, 20 nt, Artificial Sequence
  SAMD9L targeting guide sequence portion
aaagagccuuuggugccaaa

SEQ ID NO: 8339 - RNA, 20 nt, Artificial Sequence
  SAMD9L targeting guide sequence portion
aaaggcucuuuguuccuugg

SEQ ID NO: 8340 - RNA, 20 nt, Artificial Sequence
  SAMD9L targeting guide sequence portion
aacaaagagccuuuggugcc

SEQ ID NO: 8341 - RNA, 20 nt, Artificial Sequence
  SAMD9L targeting guide sequence portion
aagagccuuuggugccaaac

SEQ ID NO: 8342 - RNA, 20 nt, Artificial Sequence
  SAMD9L targeting guide sequence portion
aaggaacaaagagccuuugg

SEQ ID NO: 8343 - RNA, 20 nt, Artificial Sequence
  SAMD9L targeting guide sequence portion
aaggcucuuuguuccuugga

SEQ ID NO: 8344 - RNA, 20 nt, Artificial Sequence
  SAMD9L targeting guide sequence portion
acaaagagccuuuggugcca

SEQ ID NO: 8345 - RNA, 20 nt, Artificial Sequence
  SAMD9L targeting guide sequence portion
accaaaggcucuuuguuccu

SEQ ID NO: 8346 - RNA, 20 nt, Artificial Sequence
  SAMD9L targeting guide sequence portion
agagccuuuggugccaaacu

SEQ ID NO: 8347 - RNA, 20 nt, Artificial Sequence
  SAMD9L targeting guide sequence portion
agccuuuggugccaaacuga

SEQ ID NO: 8348 - RNA, 20 nt, Artificial Sequence
  SAMD9L targeting guide sequence portion
aggaacaaagagccuuuggu

SEQ ID NO: 8349 - RNA, 20 nt, Artificial Sequence
  SAMD9L targeting guide sequence portion
aggcucuuuguuccuuggaa

SEQ ID NO: 8350 - RNA, 20 nt, Artificial Sequence
  SAMD9L targeting guide sequence portion
aguuuggcaccaaaggcucu

SEQ ID NO: 8351 - RNA, 20 nt, Artificial Sequence
  SAMD9L targeting guide sequence portion
caaagagccuuuggugccaa

SEQ ID NO: 8352 - RNA, 20 nt, Artificial Sequence
  SAMD9L targeting guide sequence portion
caaaggcucuuuguuccuug

SEQ ID NO: 8353 - RNA, 20 nt, Artificial Sequence
  SAMD9L targeting guide sequence portion
caaggaacaaagagccuuug

SEQ ID NO: 8354 - RNA, 20 nt, Artificial Sequence
  SAMD9L targeting guide sequence portion
caccaaaggcucuuuguucc

SEQ ID NO: 8355 - RNA, 20 nt, Artificial Sequence
  SAMD9L targeting guide sequence portion
caguuuggcaccaaaggcuc

SEQ ID NO: 8356 - RNA, 20 nt, Artificial Sequence
  SAMD9L targeting guide sequence portion
ccaaaggcucuuuguuccuu

SEQ ID NO: 8357 - RNA, 20 nt, Artificial Sequence
  SAMD9L targeting guide sequence portion
ccaaggaacaaagagccuuu

SEQ ID NO: 8358 - RNA, 20 nt, Artificial Sequence
  SAMD9L targeting guide sequence portion
ccuucaguuuggcaccaaag

SEQ ID NO: 8359 - RNA, 20 nt, Artificial Sequence
  SAMD9L targeting guide sequence portion
ccuuuggugccaaacugaag

SEQ ID NO: 8360 - RNA, 20 nt, Artificial Sequence
  SAMD9L targeting guide sequence portion
cuucaguuuggcaccaaagg

SEQ ID NO: 8361 - RNA, 20 nt, Artificial Sequence
  SAMD9L targeting guide sequence portion
cuuccaaggaacaaagagcc

SEQ ID NO: 8362 - RNA, 20 nt, Artificial Sequence
  SAMD9L targeting guide sequence portion
cuuuggugccaaacugaagg

SEQ ID NO: 8363 - RNA, 20 nt, Artificial Sequence
  SAMD9L targeting guide sequence portion
gaacaaagagccuuuggugc

SEQ ID NO: 8364 - RNA, 20 nt, Artificial Sequence
  SAMD9L targeting guide sequence portion
gagccuuuggugccaaacug

SEQ ID NO: 8365 - RNA, 20 nt, Artificial Sequence
  SAMD9L targeting guide sequence portion
gcaccaaaggcucuuuguuc

SEQ ID NO: 8366 - RNA, 20 nt, Artificial Sequence
  SAMD9L targeting guide sequence portion
gccuuuggugccaaacugaa

SEQ ID NO: 8367 - RNA, 20 nt, Artificial Sequence
  SAMD9L targeting guide sequence portion
ggaacaaagagccuuuggug

SEQ ID NO: 8368 - RNA, 20 nt, Artificial Sequence
  SAMD9L targeting guide sequence portion
ggcaccaaaggcucuuuguu

SEQ ID NO: 8369 - RNA, 20 nt, Artificial Sequence
  SAMD9L targeting guide sequence portion
ggcucuuuguuccuuggaag

SEQ ID NO: 8370 - RNA, 20 nt, Artificial Sequence
  SAMD9L targeting guide sequence portion
guuuggcaccaaaggcucuu

SEQ ID NO: 8371 - RNA, 20 nt, Artificial Sequence
  SAMD9L targeting guide sequence portion
ucaguuuggcaccaaaggcu

SEQ ID NO: 8372 - RNA, 20 nt, Artificial Sequence
  SAMD9L targeting guide sequence portion
uccaaggaacaaagagccuu

SEQ ID NO: 8373 - RNA, 20 nt, Artificial Sequence
  SAMD9L targeting guide sequence portion
uggcaccaaaggcucuuugu

SEQ ID NO: 8374 - RNA, 20 nt, Artificial Sequence
  SAMD9L targeting guide sequence portion
uucaguuuggcaccaaaggc

SEQ ID NO: 8375 - RNA, 20 nt, Artificial Sequence
  SAMD9L targeting guide sequence portion
uuccaaggaacaaagagccu

SEQ ID NO: 8376 - RNA, 20 nt, Artificial Sequence
  SAMD9L targeting guide sequence portion
uuggcaccaaaggcucuuug

SEQ ID NO: 8377 - RNA, 20 nt, Artificial Sequence
  SAMD9L targeting guide sequence portion
uuuggcaccaaaggcucuuu

SEQ ID NO: 8378 - RNA, 21 nt, Artificial Sequence
  SAMD9L targeting guide sequence portion
aaagagccuuuggugccaaac

SEQ ID NO: 8379 - RNA, 21 nt, Artificial Sequence
  SAMD9L targeting guide sequence portion
aaaggcucuuuguuccuugga

SEQ ID NO: 8380 - RNA, 21 nt, Artificial Sequence
  SAMD9L targeting guide sequence portion
aacaaagagccuuuggugcca

SEQ ID NO: 8381 - RNA, 21 nt, Artificial Sequence
  SAMD9L targeting guide sequence portion
aagagccuuuggugccaaacu

SEQ ID NO: 8382 - RNA, 21 nt, Artificial Sequence
  SAMD9L targeting guide sequence portion
aaggaacaaagagccuuuggu

SEQ ID NO: 8383 - RNA, 21 nt, Artificial Sequence
  SAMD9L targeting guide sequence portion
aaggcucuuuguuccuuggaa

SEQ ID NO: 8384 - RNA, 21 nt, Artificial Sequence
  SAMD9L targeting guide sequence portion
acaaagagccuuuggugccaa

SEQ ID NO: 8385 - RNA, 21 nt, Artificial Sequence
  SAMD9L targeting guide sequence portion
accaaaggcucuuuguuccuu

SEQ ID NO: 8386 - RNA, 21 nt, Artificial Sequence
  SAMD9L targeting guide sequence portion
agagccuuuggugccaaacug

SEQ ID NO: 8387 - RNA, 21 nt, Artificial Sequence
  SAMD9L targeting guide sequence portion
agccuuuggugccaaacugaa

SEQ ID NO: 8388 - RNA, 21 nt, Artificial Sequence
  SAMD9L targeting guide sequence portion
aggaacaaagagccuuuggug

SEQ ID NO: 8389 - RNA, 21 nt, Artificial Sequence
  SAMD9L targeting guide sequence portion
aggcucuuuguuccuuggaag

SEQ ID NO: 8390 - RNA, 21 nt, Artificial Sequence
  SAMD9L targeting guide sequence portion
aguuuggcaccaaaggcucuu

SEQ ID NO: 8391 - RNA, 21 nt, Artificial Sequence
  SAMD9L targeting guide sequence portion
caaagagccuuuggugccaaa

SEQ ID NO: 8392 - RNA, 21 nt, Artificial Sequence
  SAMD9L targeting guide sequence portion
caaaggcucuuuguuccuugg

SEQ ID NO: 8393 - RNA, 21 nt, Artificial Sequence
  SAMD9L targeting guide sequence portion
caaggaacaaagagccuuugg

SEQ ID NO: 8394 - RNA, 21 nt, Artificial Sequence
  SAMD9L targeting guide sequence portion
caccaaaggcucuuuguuccu

SEQ ID NO: 8395 - RNA, 21 nt, Artificial Sequence
  SAMD9L targeting guide sequence portion
caguuuggcaccaaaggcucu

SEQ ID NO: 8396 - RNA, 21 nt, Artificial Sequence
  SAMD9L targeting guide sequence portion
ccaaaggcucuuuguuccuug

SEQ ID NO: 8397 - RNA, 21 nt, Artificial Sequence
  SAMD9L targeting guide sequence portion
ccaaggaacaaagagccuuug

SEQ ID NO: 8398 - RNA, 21 nt, Artificial Sequence
  SAMD9L targeting guide sequence portion
ccuucaguuuggcaccaaagg

SEQ ID NO: 8399 - RNA, 21 nt, Artificial Sequence
  SAMD9L targeting guide sequence portion
ccuuuggugccaaacugaagg

SEQ ID NO: 8400 - RNA, 21 nt, Artificial Sequence
  SAMD9L targeting guide sequence portion
cuucaguuuggcaccaaaggc

SEQ ID NO: 8401 - RNA, 21 nt, Artificial Sequence
  SAMD9L targeting guide sequence portion
cuuccaaggaacaaagagccu

SEQ ID NO: 8402 - RNA, 21 nt, Artificial Sequence
  SAMD9L targeting guide sequence portion
cuuuggugccaaacugaagga

SEQ ID NO: 8403 - RNA, 21 nt, Artificial Sequence
  SAMD9L targeting guide sequence portion
gaacaaagagccuuuggugcc

SEQ ID NO: 8404 - RNA, 21 nt, Artificial Sequence
  SAMD9L targeting guide sequence portion
gagccuuuggugccaaacuga

SEQ ID NO: 8405 - RNA, 21 nt, Artificial Sequence
  SAMD9L targeting guide sequence portion
gcaccaaaggcucuuuguucc

SEQ ID NO: 8406 - RNA, 21 nt, Artificial Sequence
  SAMD9L targeting guide sequence portion
gccuuuggugccaaacugaag

SEQ ID NO: 8407 - RNA, 21 nt, Artificial Sequence
  SAMD9L targeting guide sequence portion
ggaacaaagagccuuuggugc

SEQ ID NO: 8408 - RNA, 21 nt, Artificial Sequence
  SAMD9L targeting guide sequence portion
ggcaccaaaggcucuuuguuc

SEQ ID NO: 8409 - RNA, 21 nt, Artificial Sequence
  SAMD9L targeting guide sequence portion
ggcucuuuguuccuuggaaga

SEQ ID NO: 8410 - RNA, 21 nt, Artificial Sequence
  SAMD9L targeting guide sequence portion
guuuggcaccaaaggcucuuu

SEQ ID NO: 8411 - RNA, 21 nt, Artificial Sequence
  SAMD9L targeting guide sequence portion
ucaguuuggcaccaaaggcuc

SEQ ID NO: 8412 - RNA, 21 nt, Artificial Sequence
  SAMD9L targeting guide sequence portion
uccaaggaacaaagagccuuu

SEQ ID NO: 8413 - RNA, 21 nt, Artificial Sequence
  SAMD9L targeting guide sequence portion
uccuucaguuuggcaccaaag

SEQ ID NO: 8414 - RNA, 21 nt, Artificial Sequence
  SAMD9L targeting guide sequence portion
ucuuccaaggaacaaagagcc

SEQ ID NO: 8415 - RNA, 21 nt, Artificial Sequence
  SAMD9L targeting guide sequence portion
uggcaccaaaggcucuuuguu

SEQ ID NO: 8416 - RNA, 21 nt, Artificial Sequence
  SAMD9L targeting guide sequence portion
uucaguuuggcaccaaaggcu

SEQ ID NO: 8417 - RNA, 21 nt, Artificial Sequence
  SAMD9L targeting guide sequence portion
uuccaaggaacaaagagccuu

SEQ ID NO: 8418 - RNA, 21 nt, Artificial Sequence
  SAMD9L targeting guide sequence portion
uuggcaccaaaggcucuuugu

SEQ ID NO: 8419 - RNA, 21 nt, Artificial Sequence
  SAMD9L targeting guide sequence portion
uuuggcaccaaaggcucuuug

SEQ ID NO: 8420 - RNA, 22 nt, Artificial Sequence
  SAMD9L targeting guide sequence portion
aaagagccuuuggugccaaacu

SEQ ID NO: 8421 - RNA, 22 nt, Artificial Sequence
  SAMD9L targeting guide sequence portion
aaaggcucuuuguuccuuggaa

SEQ ID NO: 8422 - RNA, 22 nt, Artificial Sequence
  SAMD9L targeting guide sequence portion
aacaaagagccuuuggugccaa

SEQ ID NO: 8423 - RNA, 22 nt, Artificial Sequence
  SAMD9L targeting guide sequence portion
aagagccuuuggugccaaacug

SEQ ID NO: 8424 - RNA, 22 nt, Artificial Sequence
  SAMD9L targeting guide sequence portion
aaggaacaaagagccuuuggug

SEQ ID NO: 8425 - RNA, 22 nt, Artificial Sequence
  SAMD9L targeting guide sequence portion
aaggcucuuuguuccuuggaag

SEQ ID NO: 8426 - RNA, 22 nt, Artificial Sequence
  SAMD9L targeting guide sequence portion
acaaagagccuuuggugccaaa

SEQ ID NO: 8427 - RNA, 22 nt, Artificial Sequence
  SAMD9L targeting guide sequence portion
accaaaggcucuuuguuccuug

SEQ ID NO: 8428 - RNA, 22 nt, Artificial Sequence
  SAMD9L targeting guide sequence portion
agagccuuuggugccaaacuga

SEQ ID NO: 8429 - RNA, 22 nt, Artificial Sequence
  SAMD9L targeting guide sequence portion
agccuuuggugccaaacugaag

SEQ ID NO: 8430 - RNA, 22 nt, Artificial Sequence
  SAMD9L targeting guide sequence portion
aggaacaaagagccuuuggugc

SEQ ID NO: 8431 - RNA, 22 nt, Artificial Sequence
  SAMD9L targeting guide sequence portion
aggcucuuuguuccuuggaaga

SEQ ID NO: 8432 - RNA, 22 nt, Artificial Sequence
  SAMD9L targeting guide sequence portion
aguuuggcaccaaaggcucuuu

SEQ ID NO: 8433 - RNA, 22 nt, Artificial Sequence
  SAMD9L targeting guide sequence portion
caaagagccuuuggugccaaac

SEQ ID NO: 8434 - RNA, 22 nt, Artificial Sequence
  SAMD9L targeting guide sequence portion
caaaggcucuuuguuccuugga

SEQ ID NO: 8435 - RNA, 22 nt, Artificial Sequence
  SAMD9L targeting guide sequence portion
caaggaacaaagagccuuuggu

SEQ ID NO: 8436 - RNA, 22 nt, Artificial Sequence
  SAMD9L targeting guide sequence portion
caccaaaggcucuuuguuccuu

SEQ ID NO: 8437 - RNA, 22 nt, Artificial Sequence
  SAMD9L targeting guide sequence portion
caguuuggcaccaaaggcucuu

SEQ ID NO: 8438 - RNA, 22 nt, Artificial Sequence
  SAMD9L targeting guide sequence portion
ccaaaggcucuuuguuccuugg

SEQ ID NO: 8439 - RNA, 22 nt, Artificial Sequence
  SAMD9L targeting guide sequence portion
ccaaggaacaaagagccuuugg

SEQ ID NO: 8440 - RNA, 22 nt, Artificial Sequence
  SAMD9L targeting guide sequence portion
ccuucaguuuggcaccaaaggc

SEQ ID NO: 8441 - RNA, 22 nt, Artificial Sequence
  SAMD9L targeting guide sequence portion
ccuuuggugccaaacugaagga

SEQ ID NO: 8442 - RNA, 22 nt, Artificial Sequence
  SAMD9L targeting guide sequence portion
cuucaguuuggcaccaaaggcu

SEQ ID NO: 8443 - RNA, 22 nt, Artificial Sequence
  SAMD9L targeting guide sequence portion
cuuccaaggaacaaagagccuu

SEQ ID NO: 8444 - RNA, 22 nt, Artificial Sequence
  SAMD9L targeting guide sequence portion
cuuuggugccaaacugaaggaa

SEQ ID NO: 8445 - RNA, 22 nt, Artificial Sequence
  SAMD9L targeting guide sequence portion
gaacaaagagccuuuggugcca

SEQ ID NO: 8446 - RNA, 22 nt, Artificial Sequence
  SAMD9L targeting guide sequence portion
gagccuuuggugccaaacugaa

SEQ ID NO: 8447 - RNA, 22 nt, Artificial Sequence
  SAMD9L targeting guide sequence portion
gcaccaaaggcucuuuguuccu

SEQ ID NO: 8448 - RNA, 22 nt, Artificial Sequence
  SAMD9L targeting guide sequence portion
gccuuuggugccaaacugaagg

SEQ ID NO: 8449 - RNA, 22 nt, Artificial Sequence
  SAMD9L targeting guide sequence portion
ggaacaaagagccuuuggugcc

SEQ ID NO: 8450 - RNA, 22 nt, Artificial Sequence
  SAMD9L targeting guide sequence portion
ggcaccaaaggcucuuuguucc

SEQ ID NO: 8451 - RNA, 22 nt, Artificial Sequence
  SAMD9L targeting guide sequence portion
ggcucuuuguuccuuggaagaa

SEQ ID NO: 8452 - RNA, 22 nt, Artificial Sequence
  SAMD9L targeting guide sequence portion
guuuggcaccaaaggcucuuug

SEQ ID NO: 8453 - RNA, 22 nt, Artificial Sequence
  SAMD9L targeting guide sequence portion
ucaguuuggcaccaaaggcucu

SEQ ID NO: 8454 - RNA, 22 nt, Artificial Sequence
  SAMD9L targeting guide sequence portion
uccaaggaacaaagagccuuug

SEQ ID NO: 8455 - RNA, 22 nt, Artificial Sequence
  SAMD9L targeting guide sequence portion
uccuucaguuuggcaccaaagg

SEQ ID NO: 8456 - RNA, 22 nt, Artificial Sequence
  SAMD9L targeting guide sequence portion
ucuuccaaggaacaaagagccu

SEQ ID NO: 8457 - RNA, 22 nt, Artificial Sequence
  SAMD9L targeting guide sequence portion
uggcaccaaaggcucuuuguuc

SEQ ID NO: 8458 - RNA, 22 nt, Artificial Sequence
  SAMD9L targeting guide sequence portion
uucaguuuggcaccaaaggcuc

SEQ ID NO: 8459 - RNA, 22 nt, Artificial Sequence
  SAMD9L targeting guide sequence portion
uuccaaggaacaaagagccuuu

SEQ ID NO: 8460 - RNA, 22 nt, Artificial Sequence
  SAMD9L targeting guide sequence portion
uuccuucaguuuggcaccaaag

SEQ ID NO: 8461 - RNA, 22 nt, Artificial Sequence
  SAMD9L targeting guide sequence portion
uucuuccaaggaacaaagagcc

SEQ ID NO: 8462 - RNA, 22 nt, Artificial Sequence
  SAMD9L targeting guide sequence portion
uuggcaccaaaggcucuuuguu

SEQ ID NO: 8463 - RNA, 22 nt, Artificial Sequence
  SAMD9L targeting guide sequence portion
uuuggcaccaaaggcucuuugu

SEQ ID NO: 8464 - RNA, 20 nt, Artificial Sequence
  SAMD9L targeting guide sequence portion
aaauacuuuuugaucauuac

SEQ ID NO: 8465 - RNA, 20 nt, Artificial Sequence
  SAMD9L targeting guide sequence portion
aauacuuuuugaucauuaca

SEQ ID NO: 8466 - RNA, 20 nt, Artificial Sequence
  SAMD9L targeting guide sequence portion
aauguaaugaucaaaaagua

SEQ ID NO: 8467 - RNA, 20 nt, Artificial Sequence
  SAMD9L targeting guide sequence portion
acauugaaguggucaaugaa

SEQ ID NO: 8468 - RNA, 20 nt, Artificial Sequence
  SAMD9L targeting guide sequence portion
accacuucaauguaaugauc

SEQ ID NO: 8469 - RNA, 20 nt, Artificial Sequence
  SAMD9L targeting guide sequence portion
acuucaauguaaugaucaaa

SEQ ID NO: 8470 - RNA, 20 nt, Artificial Sequence
  SAMD9L targeting guide sequence portion
acuuuuugaucauuacauug

SEQ ID NO: 8471 - RNA, 20 nt, Artificial Sequence
  SAMD9L targeting guide sequence portion
auacuuuuugaucauuacau

SEQ ID NO: 8472 - RNA, 20 nt, Artificial Sequence
  SAMD9L targeting guide sequence portion
aucauuacauugaagugguc

SEQ ID NO: 8473 - RNA, 20 nt, Artificial Sequence
  SAMD9L targeting guide sequence portion
auguaaugaucaaaaaguau

SEQ ID NO: 8474 - RNA, 20 nt, Artificial Sequence
  SAMD9L targeting guide sequence portion
auuacauugaaguggucaau

SEQ ID NO: 8475 - RNA, 20 nt, Artificial Sequence
  SAMD9L targeting guide sequence portion
auugaccacuucaauguaau

SEQ ID NO: 8476 - RNA, 20 nt, Artificial Sequence
  SAMD9L targeting guide sequence portion
caaaauacuuuuugaucauu

SEQ ID NO: 8477 - RNA, 20 nt, Artificial Sequence
  SAMD9L targeting guide sequence portion
caauguaaugaucaaaaagu

SEQ ID NO: 8478 - RNA, 20 nt, Artificial Sequence
  SAMD9L targeting guide sequence portion
cacuucaauguaaugaucaa

SEQ ID NO: 8479 - RNA, 20 nt, Artificial Sequence
  SAMD9L targeting guide sequence portion
cauuacauugaaguggucaa

SEQ ID NO: 8480 - RNA, 20 nt, Artificial Sequence
  SAMD9L targeting guide sequence portion
cauugaaguggucaaugaag

SEQ ID NO: 8481 - RNA, 20 nt, Artificial Sequence
  SAMD9L targeting guide sequence portion
cauugaccacuucaauguaa

SEQ ID NO: 8482 - RNA, 20 nt, Artificial Sequence
  SAMD9L targeting guide sequence portion
ccacuucaauguaaugauca

SEQ ID NO: 8483 - RNA, 20 nt, Artificial Sequence
  SAMD9L targeting guide sequence portion
ccuucauugaccacuucaau

SEQ ID NO: 8484 - RNA, 20 nt, Artificial Sequence
  SAMD9L targeting guide sequence portion
cugccuucauugaccacuuc

SEQ ID NO: 8485 - RNA, 20 nt, Artificial Sequence
  SAMD9L targeting guide sequence portion
cuucaaaauacuuuuugauc

SEQ ID NO: 8486 - RNA, 20 nt, Artificial Sequence
  SAMD9L targeting guide sequence portion
cuucaauguaaugaucaaaa

SEQ ID NO: 8487 - RNA, 20 nt, Artificial Sequence
  SAMD9L targeting guide sequence portion
cuucauugaccacuucaaug

SEQ ID NO: 8488 - RNA, 20 nt, Artificial Sequence
  SAMD9L targeting guide sequence portion
cuuuuugaucauuacauuga

SEQ ID NO: 8489 - RNA, 20 nt, Artificial Sequence
  SAMD9L targeting guide sequence portion
gaccacuucaauguaaugau

SEQ ID NO: 8490 - RNA, 20 nt, Artificial Sequence
  SAMD9L targeting guide sequence portion
gaucauuacauugaaguggu

SEQ ID NO: 8491 - RNA, 20 nt, Artificial Sequence
  SAMD9L targeting guide sequence portion
gccuucauugaccacuucaa

SEQ ID NO: 8492 - RNA, 20 nt, Artificial Sequence
  SAMD9L targeting guide sequence portion
gcugccuucauugaccacuu

SEQ ID NO: 8493 - RNA, 20 nt, Artificial Sequence
  SAMD9L targeting guide sequence portion
ggcugccuucauugaccacu

SEQ ID NO: 8494 - RNA, 20 nt, Artificial Sequence
  SAMD9L targeting guide sequence portion
guaaugaucaaaaaguauuu

SEQ ID NO: 8495 - RNA, 20 nt, Artificial Sequence
  SAMD9L targeting guide sequence portion
uacauugaaguggucaauga

SEQ ID NO: 8496 - RNA, 20 nt, Artificial Sequence
  SAMD9L targeting guide sequence portion
uacuuuuugaucauuacauu

SEQ ID NO: 8497 - RNA, 20 nt, Artificial Sequence
  SAMD9L targeting guide sequence portion
ucaaaauacuuuuugaucau

SEQ ID NO: 8498 - RNA, 20 nt, Artificial Sequence
  SAMD9L targeting guide sequence portion
ucaauguaaugaucaaaaag

SEQ ID NO: 8499 - RNA, 20 nt, Artificial Sequence
  SAMD9L targeting guide sequence portion
ucauuacauugaagugguca

SEQ ID NO: 8500 - RNA, 20 nt, Artificial Sequence
  SAMD9L targeting guide sequence portion
ucauugaccacuucaaugua

SEQ ID NO: 8501 - RNA, 20 nt, Artificial Sequence
  SAMD9L targeting guide sequence portion
ucuucaaaauacuuuuugau

SEQ ID NO: 8502 - RNA, 20 nt, Artificial Sequence
  SAMD9L targeting guide sequence portion
ugaccacuucaauguaauga

SEQ ID NO: 8503 - RNA, 20 nt, Artificial Sequence
  SAMD9L targeting guide sequence portion
ugaucauuacauugaagugg

SEQ ID NO: 8504 - RNA, 20 nt, Artificial Sequence
  SAMD9L targeting guide sequence portion
ugccuucauugaccacuuca

SEQ ID NO: 8505 - RNA, 20 nt, Artificial Sequence
  SAMD9L targeting guide sequence portion
uguaaugaucaaaaaguauu

SEQ ID NO: 8506 - RNA, 20 nt, Artificial Sequence
  SAMD9L targeting guide sequence portion
uuacauugaaguggucaaug

SEQ ID NO: 8507 - RNA, 20 nt, Artificial Sequence
  SAMD9L targeting guide sequence portion
uucaaaauacuuuuugauca

SEQ ID NO: 8508 - RNA, 20 nt, Artificial Sequence
  SAMD9L targeting guide sequence portion
uucaauguaaugaucaaaaa

SEQ ID NO: 8509 - RNA, 20 nt, Artificial Sequence
  SAMD9L targeting guide sequence portion
uucauugaccacuucaaugu

SEQ ID NO: 8510 - RNA, 20 nt, Artificial Sequence
  SAMD9L targeting guide sequence portion
uugaccacuucaauguaaug

SEQ ID NO: 8511 - RNA, 20 nt, Artificial Sequence
  SAMD9L targeting guide sequence portion
uugaucauuacauugaagug

SEQ ID NO: 8512 - RNA, 20 nt, Artificial Sequence
  SAMD9L targeting guide sequence portion
uuugaucauuacauugaagu

SEQ ID NO: 8513 - RNA, 20 nt, Artificial Sequence
  SAMD9L targeting guide sequence portion
uuuugaucauuacauugaag

SEQ ID NO: 8514 - RNA, 20 nt, Artificial Sequence
  SAMD9L targeting guide sequence portion
uuuuugaucauuacauugaa

SEQ ID NO: 8515 - RNA, 21 nt, Artificial Sequence
  SAMD9L targeting guide sequence portion
acauugaaguggucaaugaag

SEQ ID NO: 8516 - RNA, 21 nt, Artificial Sequence
  SAMD9L targeting guide sequence portion
accacuucaauguaaugauca

SEQ ID NO: 8517 - RNA, 21 nt, Artificial Sequence
  SAMD9L targeting guide sequence portion
acuucaauguaaugaucaaaa

SEQ ID NO: 8518 - RNA, 21 nt, Artificial Sequence
  SAMD9L targeting guide sequence portion
acuuuuugaucauuacauuga

SEQ ID NO: 8519 - RNA, 21 nt, Artificial Sequence
  SAMD9L targeting guide sequence portion
aggcugccuucauugaccacu

SEQ ID NO: 8520 - RNA, 21 nt, Artificial Sequence
  SAMD9L targeting guide sequence portion
aucauuacauugaagugguca

SEQ ID NO: 8521 - RNA, 21 nt, Artificial Sequence
  SAMD9L targeting guide sequence portion
auuacauugaaguggucaaug

SEQ ID NO: 8522 - RNA, 21 nt, Artificial Sequence
  SAMD9L targeting guide sequence portion
auugaccacuucaauguaaug

SEQ ID NO: 8523 - RNA, 21 nt, Artificial Sequence
  SAMD9L targeting guide sequence portion
caauguaaugaucaaaaagua

SEQ ID NO: 8524 - RNA, 21 nt, Artificial Sequence
  SAMD9L targeting guide sequence portion
cacuucaauguaaugaucaaa

SEQ ID NO: 8525 - RNA, 21 nt, Artificial Sequence
  SAMD9L targeting guide sequence portion
cauuacauugaaguggucaau

SEQ ID NO: 8526 - RNA, 21 nt, Artificial Sequence
  SAMD9L targeting guide sequence portion
cauugaaguggucaaugaagg

SEQ ID NO: 8527 - RNA, 21 nt, Artificial Sequence
  SAMD9L targeting guide sequence portion
cauugaccacuucaauguaau

SEQ ID NO: 8528 - RNA, 21 nt, Artificial Sequence
  SAMD9L targeting guide sequence portion
ccacuucaauguaaugaucaa

SEQ ID NO: 8529 - RNA, 21 nt, Artificial Sequence
  SAMD9L targeting guide sequence portion
ccuucauugaccacuucaaug

SEQ ID NO: 8530 - RNA, 21 nt, Artificial Sequence
  SAMD9L targeting guide sequence portion
cugccuucauugaccacuuca

SEQ ID NO: 8531 - RNA, 21 nt, Artificial Sequence
  SAMD9L targeting guide sequence portion
cuucaaaauacuuuuugauca

SEQ ID NO: 8532 - RNA, 21 nt, Artificial Sequence
  SAMD9L targeting guide sequence portion
cuucaauguaaugaucaaaaa

SEQ ID NO: 8533 - RNA, 21 nt, Artificial Sequence
  SAMD9L targeting guide sequence portion
cuucauugaccacuucaaugu

SEQ ID NO: 8534 - RNA, 21 nt, Artificial Sequence
  SAMD9L targeting guide sequence portion
cuuuuugaucauuacauugaa

SEQ ID NO: 8535 - RNA, 21 nt, Artificial Sequence
  SAMD9L targeting guide sequence portion
gaccacuucaauguaaugauc

SEQ ID NO: 8536 - RNA, 21 nt, Artificial Sequence
  SAMD9L targeting guide sequence portion
gaucauuacauugaagugguc

SEQ ID NO: 8537 - RNA, 21 nt, Artificial Sequence
  SAMD9L targeting guide sequence portion
gccuucauugaccacuucaau

SEQ ID NO: 8538 - RNA, 21 nt, Artificial Sequence
  SAMD9L targeting guide sequence portion
gcugccuucauugaccacuuc

SEQ ID NO: 8539 - RNA, 21 nt, Artificial Sequence
  SAMD9L targeting guide sequence portion
ggcugccuucauugaccacuu

SEQ ID NO: 8540 - RNA, 21 nt, Artificial Sequence
  SAMD9L targeting guide sequence portion
uacauugaaguggucaaugaa

SEQ ID NO: 8541 - RNA, 21 nt, Artificial Sequence
  SAMD9L targeting guide sequence portion
uacuuuuugaucauuacauug

SEQ ID NO: 8542 - RNA, 21 nt, Artificial Sequence
  SAMD9L targeting guide sequence portion
ucaauguaaugaucaaaaagu

SEQ ID NO: 8543 - RNA, 21 nt, Artificial Sequence
  SAMD9L targeting guide sequence portion
ucauuacauugaaguggucaa

SEQ ID NO: 8544 - RNA, 21 nt, Artificial Sequence
  SAMD9L targeting guide sequence portion
ucauugaccacuucaauguaa

SEQ ID NO: 8545 - RNA, 21 nt, Artificial Sequence
  SAMD9L targeting guide sequence portion
ucuucaaaauacuuuuugauc

SEQ ID NO: 8546 - RNA, 21 nt, Artificial Sequence
  SAMD9L targeting guide sequence portion
ugaccacuucaauguaaugau

SEQ ID NO: 8547 - RNA, 21 nt, Artificial Sequence
  SAMD9L targeting guide sequence portion
ugaucauuacauugaaguggu

SEQ ID NO: 8548 - RNA, 21 nt, Artificial Sequence
  SAMD9L targeting guide sequence portion
ugccuucauugaccacuucaa

SEQ ID NO: 8549 - RNA, 21 nt, Artificial Sequence
  SAMD9L targeting guide sequence portion
uuacauugaaguggucaauga

SEQ ID NO: 8550 - RNA, 21 nt, Artificial Sequence
  SAMD9L targeting guide sequence portion
uucaauguaaugaucaaaaag

SEQ ID NO: 8551 - RNA, 21 nt, Artificial Sequence
  SAMD9L targeting guide sequence portion
uucauugaccacuucaaugua

SEQ ID NO: 8552 - RNA, 21 nt, Artificial Sequence
  SAMD9L targeting guide sequence portion
uugaccacuucaauguaauga

SEQ ID NO: 8553 - RNA, 21 nt, Artificial Sequence
  SAMD9L targeting guide sequence portion
uugaucauuacauugaagugg

SEQ ID NO: 8554 - RNA, 21 nt, Artificial Sequence
  SAMD9L targeting guide sequence portion
uuugaucauuacauugaagug

SEQ ID NO: 8555 - RNA, 21 nt, Artificial Sequence
  SAMD9L targeting guide sequence portion
uuuugaucauuacauugaagu

SEQ ID NO: 8556 - RNA, 21 nt, Artificial Sequence
  SAMD9L targeting guide sequence portion
uuuuugaucauuacauugaag

SEQ ID NO: 8557 - RNA, 22 nt, Artificial Sequence
  SAMD9L targeting guide sequence portion
aaggcugccuucauugaccacu

SEQ ID NO: 8558 - RNA, 22 nt, Artificial Sequence
  SAMD9L targeting guide sequence portion
acauugaaguggucaaugaagg

SEQ ID NO: 8559 - RNA, 22 nt, Artificial Sequence
  SAMD9L targeting guide sequence portion
accacuucaauguaaugaucaa

SEQ ID NO: 8560 - RNA, 22 nt, Artificial Sequence
  SAMD9L targeting guide sequence portion
acuucaauguaaugaucaaaaa

SEQ ID NO: 8561 - RNA, 22 nt, Artificial Sequence
  SAMD9L targeting guide sequence portion
acuuuuugaucauuacauugaa

SEQ ID NO: 8562 - RNA, 22 nt, Artificial Sequence
  SAMD9L targeting guide sequence portion
aggcugccuucauugaccacuu

SEQ ID NO: 8563 - RNA, 22 nt, Artificial Sequence
  SAMD9L targeting guide sequence portion
auacuuuuugaucauuacauug

SEQ ID NO: 8564 - RNA, 22 nt, Artificial Sequence
  SAMD9L targeting guide sequence portion
aucauuacauugaaguggucaa

SEQ ID NO: 8565 - RNA, 22 nt, Artificial Sequence
  SAMD9L targeting guide sequence portion
auuacauugaaguggucaauga

SEQ ID NO: 8566 - RNA, 22 nt, Artificial Sequence
  SAMD9L targeting guide sequence portion
auugaccacuucaauguaauga

SEQ ID NO: 8567 - RNA, 22 nt, Artificial Sequence
  SAMD9L targeting guide sequence portion
caaaauacuuuuugaucauuac

SEQ ID NO: 8568 - RNA, 22 nt, Artificial Sequence
  SAMD9L targeting guide sequence portion
caauguaaugaucaaaaaguau

SEQ ID NO: 8569 - RNA, 22 nt, Artificial Sequence
  SAMD9L targeting guide sequence portion
cacuucaauguaaugaucaaaa

SEQ ID NO: 8570 - RNA, 22 nt, Artificial Sequence
  SAMD9L targeting guide sequence portion
cauuacauugaaguggucaaug

SEQ ID NO: 8571 - RNA, 22 nt, Artificial Sequence
  SAMD9L targeting guide sequence portion
cauugaaguggucaaugaaggc

SEQ ID NO: 8572 - RNA, 22 nt, Artificial Sequence
  SAMD9L targeting guide sequence portion
cauugaccacuucaauguaaug

SEQ ID NO: 8573 - RNA, 22 nt, Artificial Sequence
  SAMD9L targeting guide sequence portion
ccacuucaauguaaugaucaaa

SEQ ID NO: 8574 - RNA, 22 nt, Artificial Sequence
  SAMD9L targeting guide sequence portion
ccuucauugaccacuucaaugu

SEQ ID NO: 8575 - RNA, 22 nt, Artificial Sequence
  SAMD9L targeting guide sequence portion
cugccuucauugaccacuucaa

SEQ ID NO: 8576 - RNA, 22 nt, Artificial Sequence
  SAMD9L targeting guide sequence portion
cuucaaaauacuuuuugaucau

SEQ ID NO: 8577 - RNA, 22 nt, Artificial Sequence
  SAMD9L targeting guide sequence portion
cuucaauguaaugaucaaaaag

SEQ ID NO: 8578 - RNA, 22 nt, Artificial Sequence
  SAMD9L targeting guide sequence portion
cuucauugaccacuucaaugua

SEQ ID NO: 8579 - RNA, 22 nt, Artificial Sequence
  SAMD9L targeting guide sequence portion
cuuuuugaucauuacauugaag

SEQ ID NO: 8580 - RNA, 22 nt, Artificial Sequence
  SAMD9L targeting guide sequence portion
gaccacuucaauguaaugauca

SEQ ID NO: 8581 - RNA, 22 nt, Artificial Sequence
  SAMD9L targeting guide sequence portion
gaucauuacauugaagugguca

SEQ ID NO: 8582 - RNA, 22 nt, Artificial Sequence
  SAMD9L targeting guide sequence portion
gccuucauugaccacuucaaug

SEQ ID NO: 8583 - RNA, 22 nt, Artificial Sequence
  SAMD9L targeting guide sequence portion
gcugccuucauugaccacuuca

SEQ ID NO: 8584 - RNA, 22 nt, Artificial Sequence
  SAMD9L targeting guide sequence portion
ggcugccuucauugaccacuuc

SEQ ID NO: 8585 - RNA, 22 nt, Artificial Sequence
  SAMD9L targeting guide sequence portion
guaaugaucaaaaaguauuuug

SEQ ID NO: 8586 - RNA, 22 nt, Artificial Sequence
  SAMD9L targeting guide sequence portion
uacauugaaguggucaaugaag

SEQ ID NO: 8587 - RNA, 22 nt, Artificial Sequence
  SAMD9L targeting guide sequence portion
uacuuuuugaucauuacauuga

SEQ ID NO: 8588 - RNA, 22 nt, Artificial Sequence
  SAMD9L targeting guide sequence portion
ucaauguaaugaucaaaaagua

SEQ ID NO: 8589 - RNA, 22 nt, Artificial Sequence
  SAMD9L targeting guide sequence portion
ucauuacauugaaguggucaau

SEQ ID NO: 8590 - RNA, 22 nt, Artificial Sequence
  SAMD9L targeting guide sequence portion
ucauugaccacuucaauguaau

SEQ ID NO: 8591 - RNA, 22 nt, Artificial Sequence
  SAMD9L targeting guide sequence portion
ucuucaaaauacuuuuugauca

SEQ ID NO: 8592 - RNA, 22 nt, Artificial Sequence
  SAMD9L targeting guide sequence portion
ugaccacuucaauguaaugauc

SEQ ID NO: 8593 - RNA, 22 nt, Artificial Sequence
  SAMD9L targeting guide sequence portion
ugaucauuacauugaagugguc

SEQ ID NO: 8594 - RNA, 22 nt, Artificial Sequence
  SAMD9L targeting guide sequence portion
ugccuucauugaccacuucaau

SEQ ID NO: 8595 - RNA, 22 nt, Artificial Sequence
  SAMD9L targeting guide sequence portion
uuacauugaaguggucaaugaa

SEQ ID NO: 8596 - RNA, 22 nt, Artificial Sequence
  SAMD9L targeting guide sequence portion
uucaauguaaugaucaaaaagu

SEQ ID NO: 8597 - RNA, 22 nt, Artificial Sequence
  SAMD9L targeting guide sequence portion
uucauugaccacuucaauguaa

SEQ ID NO: 8598 - RNA, 22 nt, Artificial Sequence
  SAMD9L targeting guide sequence portion
uucuucaaaauacuuuuugauc

SEQ ID NO: 8599 - RNA, 22 nt, Artificial Sequence
  SAMD9L targeting guide sequence portion
uugaccacuucaauguaaugau

SEQ ID NO: 8600 - RNA, 22 nt, Artificial Sequence
  SAMD9L targeting guide sequence portion
uugaucauuacauugaaguggu

SEQ ID NO: 8601 - RNA, 22 nt, Artificial Sequence
  SAMD9L targeting guide sequence portion
uuugaucauuacauugaagugg

SEQ ID NO: 8602 - RNA, 22 nt, Artificial Sequence
  SAMD9L targeting guide sequence portion
uuuugaucauuacauugaagug

SEQ ID NO: 8603 - RNA, 22 nt, Artificial Sequence
  SAMD9L targeting guide sequence portion
uuuuugaucauuacauugaagu

SEQ ID NO: 8604 - RNA, 20 nt, Artificial Sequence
  SAMD9L targeting guide sequence portion
accacuucaauauaaugauc

SEQ ID NO: 8605 - RNA, 20 nt, Artificial Sequence
  SAMD9L targeting guide sequence portion
acuucaauauaaugaucaaa

SEQ ID NO: 8606 - RNA, 20 nt, Artificial Sequence
  SAMD9L targeting guide sequence portion
acuuuuugaucauuauauug

SEQ ID NO: 8607 - RNA, 20 nt, Artificial Sequence
  SAMD9L targeting guide sequence portion
auauugaaguggucaaugaa

SEQ ID NO: 8608 - RNA, 20 nt, Artificial Sequence
  SAMD9L targeting guide sequence portion
aucauuauauugaagugguc

SEQ ID NO: 8609 - RNA, 20 nt, Artificial Sequence
  SAMD9L targeting guide sequence portion
auuauauugaaguggucaau

SEQ ID NO: 8610 - RNA, 20 nt, Artificial Sequence
  SAMD9L targeting guide sequence portion
auugaccacuucaauauaau

SEQ ID NO: 8611 - RNA, 20 nt, Artificial Sequence
  SAMD9L targeting guide sequence portion
caauauaaugaucaaaaagu

SEQ ID NO: 8612 - RNA, 20 nt, Artificial Sequence
  SAMD9L targeting guide sequence portion
cacuucaauauaaugaucaa

SEQ ID NO: 8613 - RNA, 20 nt, Artificial Sequence
  SAMD9L targeting guide sequence portion
cauuauauugaaguggucaa

SEQ ID NO: 8614 - RNA, 20 nt, Artificial Sequence
  SAMD9L targeting guide sequence portion
cauugaccacuucaauauaa

SEQ ID NO: 8615 - RNA, 20 nt, Artificial Sequence
  SAMD9L targeting guide sequence portion
ccacuucaauauaaugauca

SEQ ID NO: 8616 - RNA, 20 nt, Artificial Sequence
  SAMD9L targeting guide sequence portion
cuucaauauaaugaucaaaa

SEQ ID NO: 8617 - RNA, 20 nt, Artificial Sequence
  SAMD9L targeting guide sequence portion
cuucauugaccacuucaaua

SEQ ID NO: 8618 - RNA, 20 nt, Artificial Sequence
  SAMD9L targeting guide sequence portion
cuuuuugaucauuauauuga

SEQ ID NO: 8619 - RNA, 20 nt, Artificial Sequence
  SAMD9L targeting guide sequence portion
gaccacuucaauauaaugau

SEQ ID NO: 8620 - RNA, 20 nt, Artificial Sequence
  SAMD9L targeting guide sequence portion
gaucauuauauugaaguggu

SEQ ID NO: 8621 - RNA, 20 nt, Artificial Sequence
  SAMD9L targeting guide sequence portion
uauauugaaguggucaauga

SEQ ID NO: 8622 - RNA, 20 nt, Artificial Sequence
  SAMD9L targeting guide sequence portion
uauugaaguggucaaugaag

SEQ ID NO: 8623 - RNA, 20 nt, Artificial Sequence
  SAMD9L targeting guide sequence portion
ucaauauaaugaucaaaaag

SEQ ID NO: 8624 - RNA, 20 nt, Artificial Sequence
  SAMD9L targeting guide sequence portion
ucauuauauugaagugguca

SEQ ID NO: 8625 - RNA, 20 nt, Artificial Sequence
  SAMD9L targeting guide sequence portion
ucauugaccacuucaauaua

SEQ ID NO: 8626 - RNA, 20 nt, Artificial Sequence
  SAMD9L targeting guide sequence portion
ugaccacuucaauauaauga

SEQ ID NO: 8627 - RNA, 20 nt, Artificial Sequence
  SAMD9L targeting guide sequence portion
ugaucauuauauugaagugg

SEQ ID NO: 8628 - RNA, 20 nt, Artificial Sequence
  SAMD9L targeting guide sequence portion
uuauauugaaguggucaaug

SEQ ID NO: 8629 - RNA, 20 nt, Artificial Sequence
  SAMD9L targeting guide sequence portion
uucauugaccacuucaauau

SEQ ID NO: 8630 - RNA, 20 nt, Artificial Sequence
  SAMD9L targeting guide sequence portion
uugaccacuucaauauaaug

SEQ ID NO: 8631 - RNA, 20 nt, Artificial Sequence
  SAMD9L targeting guide sequence portion
uugaucauuauauugaagug

SEQ ID NO: 8632 - RNA, 20 nt, Artificial Sequence
  SAMD9L targeting guide sequence portion
uuugaucauuauauugaagu

SEQ ID NO: 8633 - RNA, 20 nt, Artificial Sequence
  SAMD9L targeting guide sequence portion
uuuugaucauuauauugaag

SEQ ID NO: 8634 - RNA, 21 nt, Artificial Sequence
  SAMD9L targeting guide sequence portion
accacuucaauauaaugauca

SEQ ID NO: 8635 - RNA, 21 nt, Artificial Sequence
  SAMD9L targeting guide sequence portion
auauugaaguggucaaugaag

SEQ ID NO: 8636 - RNA, 21 nt, Artificial Sequence
  SAMD9L targeting guide sequence portion
aucauuauauugaagugguca

SEQ ID NO: 8637 - RNA, 21 nt, Artificial Sequence
  SAMD9L targeting guide sequence portion
auuauauugaaguggucaaug

SEQ ID NO: 8638 - RNA, 21 nt, Artificial Sequence
  SAMD9L targeting guide sequence portion
auugaccacuucaauauaaug

SEQ ID NO: 8639 - RNA, 21 nt, Artificial Sequence
  SAMD9L targeting guide sequence portion
cacuucaauauaaugaucaaa

SEQ ID NO: 8640 - RNA, 21 nt, Artificial Sequence
  SAMD9L targeting guide sequence portion
cauuauauugaaguggucaau

SEQ ID NO: 8641 - RNA, 21 nt, Artificial Sequence
  SAMD9L targeting guide sequence portion
cauugaccacuucaauauaau

SEQ ID NO: 8642 - RNA, 21 nt, Artificial Sequence
  SAMD9L targeting guide sequence portion
ccacuucaauauaaugaucaa

SEQ ID NO: 8643 - RNA, 21 nt, Artificial Sequence
  SAMD9L targeting guide sequence portion
ccuucauugaccacuucaaua

SEQ ID NO: 8644 - RNA, 21 nt, Artificial Sequence
  SAMD9L targeting guide sequence portion
cuucauugaccacuucaauau

SEQ ID NO: 8645 - RNA, 21 nt, Artificial Sequence
  SAMD9L targeting guide sequence portion
gaccacuucaauauaaugauc

SEQ ID NO: 8646 - RNA, 21 nt, Artificial Sequence
  SAMD9L targeting guide sequence portion
gaucauuauauugaagugguc

SEQ ID NO: 8647 - RNA, 21 nt, Artificial Sequence
  SAMD9L targeting guide sequence portion
uauauugaaguggucaaugaa

SEQ ID NO: 8648 - RNA, 21 nt, Artificial Sequence
  SAMD9L targeting guide sequence portion
uauugaaguggucaaugaagg

SEQ ID NO: 8649 - RNA, 21 nt, Artificial Sequence
  SAMD9L targeting guide sequence portion
ucauuauauugaaguggucaa

SEQ ID NO: 8650 - RNA, 21 nt, Artificial Sequence
  SAMD9L targeting guide sequence portion
ucauugaccacuucaauauaa

SEQ ID NO: 8651 - RNA, 21 nt, Artificial Sequence
  SAMD9L targeting guide sequence portion
ugaccacuucaauauaaugau

SEQ ID NO: 8652 - RNA, 21 nt, Artificial Sequence
  SAMD9L targeting guide sequence portion
ugaucauuauauugaaguggu

SEQ ID NO: 8653 - RNA, 21 nt, Artificial Sequence
  SAMD9L targeting guide sequence portion
uuauauugaaguggucaauga

SEQ ID NO: 8654 - RNA, 21 nt, Artificial Sequence
  SAMD9L targeting guide sequence portion
uucauugaccacuucaauaua

SEQ ID NO: 8655 - RNA, 21 nt, Artificial Sequence
  SAMD9L targeting guide sequence portion
uugaccacuucaauauaauga

SEQ ID NO: 8656 - RNA, 21 nt, Artificial Sequence
  SAMD9L targeting guide sequence portion
uugaucauuauauugaagugg

SEQ ID NO: 8657 - RNA, 21 nt, Artificial Sequence
  SAMD9L targeting guide sequence portion
uuugaucauuauauugaagug

SEQ ID NO: 8658 - RNA, 22 nt, Artificial Sequence
  SAMD9L targeting guide sequence portion
accacuucaauauaaugaucaa

SEQ ID NO: 8659 - RNA, 22 nt, Artificial Sequence
  SAMD9L targeting guide sequence portion
auauugaaguggucaaugaagg

SEQ ID NO: 8660 - RNA, 22 nt, Artificial Sequence
  SAMD9L targeting guide sequence portion
aucauuauauugaaguggucaa

SEQ ID NO: 8661 - RNA, 22 nt, Artificial Sequence
  SAMD9L targeting guide sequence portion
auuauauugaaguggucaauga

SEQ ID NO: 8662 - RNA, 22 nt, Artificial Sequence
  SAMD9L targeting guide sequence portion
auugaccacuucaauauaauga

SEQ ID NO: 8663 - RNA, 22 nt, Artificial Sequence
  SAMD9L targeting guide sequence portion
cacuucaauauaaugaucaaaa

SEQ ID NO: 8664 - RNA, 22 nt, Artificial Sequence
  SAMD9L targeting guide sequence portion
cauuauauugaaguggucaaug

SEQ ID NO: 8665 - RNA, 22 nt, Artificial Sequence
  SAMD9L targeting guide sequence portion
cauugaccacuucaauauaaug

SEQ ID NO: 8666 - RNA, 22 nt, Artificial Sequence
  SAMD9L targeting guide sequence portion
ccacuucaauauaaugaucaaa

SEQ ID NO: 8667 - RNA, 22 nt, Artificial Sequence
  SAMD9L targeting guide sequence portion
ccuucauugaccacuucaauau

SEQ ID NO: 8668 - RNA, 22 nt, Artificial Sequence
  SAMD9L targeting guide sequence portion
cuucaauauaaugaucaaaaag

SEQ ID NO: 8669 - RNA, 22 nt, Artificial Sequence
  SAMD9L targeting guide sequence portion
cuucauugaccacuucaauaua

SEQ ID NO: 8670 - RNA, 22 nt, Artificial Sequence
  SAMD9L targeting guide sequence portion
cuuuuugaucauuauauugaag

SEQ ID NO: 8671 - RNA, 22 nt, Artificial Sequence
  SAMD9L targeting guide sequence portion
gaccacuucaauauaaugauca

SEQ ID NO: 8672 - RNA, 22 nt, Artificial Sequence
  SAMD9L targeting guide sequence portion
gaucauuauauugaagugguca

SEQ ID NO: 8673 - RNA, 22 nt, Artificial Sequence
  SAMD9L targeting guide sequence portion
gccuucauugaccacuucaaua

SEQ ID NO: 8674 - RNA, 22 nt, Artificial Sequence
  SAMD9L targeting guide sequence portion
uauauugaaguggucaaugaag

SEQ ID NO: 8675 - RNA, 22 nt, Artificial Sequence
  SAMD9L targeting guide sequence portion
uauugaaguggucaaugaaggc

SEQ ID NO: 8676 - RNA, 22 nt, Artificial Sequence
  SAMD9L targeting guide sequence portion
ucauuauauugaaguggucaau

SEQ ID NO: 8677 - RNA, 22 nt, Artificial Sequence
  SAMD9L targeting guide sequence portion
ucauugaccacuucaauauaau

SEQ ID NO: 8678 - RNA, 22 nt, Artificial Sequence
  SAMD9L targeting guide sequence portion
ugaccacuucaauauaaugauc

SEQ ID NO: 8679 - RNA, 22 nt, Artificial Sequence
  SAMD9L targeting guide sequence portion
ugaucauuauauugaagugguc

SEQ ID NO: 8680 - RNA, 22 nt, Artificial Sequence
  SAMD9L targeting guide sequence portion
uuauauugaaguggucaaugaa

SEQ ID NO: 8681 - RNA, 22 nt, Artificial Sequence
  SAMD9L targeting guide sequence portion
uucauugaccacuucaauauaa

SEQ ID NO: 8682 - RNA, 22 nt, Artificial Sequence
  SAMD9L targeting guide sequence portion
uugaccacuucaauauaaugau

SEQ ID NO: 8683 - RNA, 22 nt, Artificial Sequence
  SAMD9L targeting guide sequence portion
uugaucauuauauugaaguggu

SEQ ID NO: 8684 - RNA, 22 nt, Artificial Sequence
  SAMD9L targeting guide sequence portion
uuugaucauuauauugaagugg

SEQ ID NO: 8685 - RNA, 22 nt, Artificial Sequence
  SAMD9L targeting guide sequence portion
uuuugaucauuauauugaagug

SEQ ID NO: 8686 - RNA, 20 nt, Artificial Sequence
  SAMD9L targeting guide sequence portion
aaaacagaacaccagaaaaa

SEQ ID NO: 8687 - RNA, 20 nt, Artificial Sequence
  SAMD9L targeting guide sequence portion
aaaaccguccaaaacagaac

SEQ ID NO: 8688 - RNA, 20 nt, Artificial Sequence
  SAMD9L targeting guide sequence portion
aaacagaacaccagaaaaau

SEQ ID NO: 8689 - RNA, 20 nt, Artificial Sequence
  SAMD9L targeting guide sequence portion
aaaccguccaaaacagaaca

SEQ ID NO: 8690 - RNA, 20 nt, Artificial Sequence
  SAMD9L targeting guide sequence portion
aacaccagaaaaauccaaaa

SEQ ID NO: 8691 - RNA, 20 nt, Artificial Sequence
  SAMD9L targeting guide sequence portion
aacagaacaccagaaaaauc

SEQ ID NO: 8692 - RNA, 20 nt, Artificial Sequence
  SAMD9L targeting guide sequence portion
aaccguccaaaacagaacac

SEQ ID NO: 8693 - RNA, 20 nt, Artificial Sequence
  SAMD9L targeting guide sequence portion
acaccagaaaaauccaaaac

SEQ ID NO: 8694 - RNA, 20 nt, Artificial Sequence
  SAMD9L targeting guide sequence portion
acagaacaccagaaaaaucc

SEQ ID NO: 8695 - RNA, 20 nt, Artificial Sequence
  SAMD9L targeting guide sequence portion
accagaaaaauccaaaacac

SEQ ID NO: 8696 - RNA, 20 nt, Artificial Sequence
  SAMD9L targeting guide sequence portion
accguccaaaacagaacacc

SEQ ID NO: 8697 - RNA, 20 nt, Artificial Sequence
  SAMD9L targeting guide sequence portion
agaaaaauccaaaacacacc

SEQ ID NO: 8698 - RNA, 20 nt, Artificial Sequence
  SAMD9L targeting guide sequence portion
agaacaccagaaaaauccaa

SEQ ID NO: 8699 - RNA, 20 nt, Artificial Sequence
  SAMD9L targeting guide sequence portion
auuuuucugguguucuguuu

SEQ ID NO: 8700 - RNA, 20 nt, Artificial Sequence
  SAMD9L targeting guide sequence portion
caaaacagaacaccagaaaa

SEQ ID NO: 8701 - RNA, 20 nt, Artificial Sequence
  SAMD9L targeting guide sequence portion
caaaaccguccaaaacagaa

SEQ ID NO: 8702 - RNA, 20 nt, Artificial Sequence
  SAMD9L targeting guide sequence portion
caccagaaaaauccaaaaca

SEQ ID NO: 8703 - RNA, 20 nt, Artificial Sequence
  SAMD9L targeting guide sequence portion
cagaaaaauccaaaacacac

SEQ ID NO: 8704 - RNA, 20 nt, Artificial Sequence
  SAMD9L targeting guide sequence portion
cagaacaccagaaaaaucca

SEQ ID NO: 8705 - RNA, 20 nt, Artificial Sequence
  SAMD9L targeting guide sequence portion
ccaaaacagaacaccagaaa

SEQ ID NO: 8706 - RNA, 20 nt, Artificial Sequence
  SAMD9L targeting guide sequence portion
ccagaaaaauccaaaacaca

SEQ ID NO: 8707 - RNA, 20 nt, Artificial Sequence
  SAMD9L targeting guide sequence portion
ccguccaaaacagaacacca

SEQ ID NO: 8708 - RNA, 20 nt, Artificial Sequence
  SAMD9L targeting guide sequence portion
ccuuuuugguguguuuugga

SEQ ID NO: 8709 - RNA, 20 nt, Artificial Sequence
  SAMD9L targeting guide sequence portion
cguccaaaacagaacaccag

SEQ ID NO: 8710 - RNA, 20 nt, Artificial Sequence
  SAMD9L targeting guide sequence portion
cugguguucuguuuuggacg

SEQ ID NO: 8711 - RNA, 20 nt, Artificial Sequence
  SAMD9L targeting guide sequence portion
cuuuuugguguguuuuggau

SEQ ID NO: 8712 - RNA, 20 nt, Artificial Sequence
  SAMD9L targeting guide sequence portion
gaaaaauccaaaacacacca

SEQ ID NO: 8713 - RNA, 20 nt, Artificial Sequence
  SAMD9L targeting guide sequence portion
gaacaccagaaaaauccaaa

SEQ ID NO: 8714 - RNA, 20 nt, Artificial Sequence
  SAMD9L targeting guide sequence portion
gauuuuucugguguucuguu

SEQ ID NO: 8715 - RNA, 20 nt, Artificial Sequence
  SAMD9L targeting guide sequence portion
ggauuuuucugguguucugu

SEQ ID NO: 8716 - RNA, 20 nt, Artificial Sequence
  SAMD9L targeting guide sequence portion
gguguguuuuggauuuuucu

SEQ ID NO: 8717 - RNA, 20 nt, Artificial Sequence
  SAMD9L targeting guide sequence portion
guccaaaacagaacaccaga

SEQ ID NO: 8718 - RNA, 20 nt, Artificial Sequence
  SAMD9L targeting guide sequence portion
guguguuuuggauuuuucug

SEQ ID NO: 8719 - RNA, 20 nt, Artificial Sequence
  SAMD9L targeting guide sequence portion
guguuuuggauuuuucuggu

SEQ ID NO: 8720 - RNA, 20 nt, Artificial Sequence
  SAMD9L targeting guide sequence portion
guuuuggauuuuucuggugu

SEQ ID NO: 8721 - RNA, 20 nt, Artificial Sequence
  SAMD9L targeting guide sequence portion
uccaaaacagaacaccagaa

SEQ ID NO: 8722 - RNA, 20 nt, Artificial Sequence
  SAMD9L targeting guide sequence portion
ucugguguucuguuuuggac

SEQ ID NO: 8723 - RNA, 20 nt, Artificial Sequence
  SAMD9L targeting guide sequence portion
uggauuuuucugguguucug

SEQ ID NO: 8724 - RNA, 20 nt, Artificial Sequence
  SAMD9L targeting guide sequence portion
ugguguguuuuggauuuuuc

SEQ ID NO: 8725 - RNA, 20 nt, Artificial Sequence
  SAMD9L targeting guide sequence portion
uguguuuuggauuuuucugg

SEQ ID NO: 8726 - RNA, 20 nt, Artificial Sequence
  SAMD9L targeting guide sequence portion
uguuuuggauuuuucuggug

SEQ ID NO: 8727 - RNA, 20 nt, Artificial Sequence
  SAMD9L targeting guide sequence portion
uucugguguucuguuuugga

SEQ ID NO: 8728 - RNA, 20 nt, Artificial Sequence
  SAMD9L targeting guide sequence portion
uuggauuuuucugguguucu

SEQ ID NO: 8729 - RNA, 20 nt, Artificial Sequence
  SAMD9L targeting guide sequence portion
uugguguguuuuggauuuuu

SEQ ID NO: 8730 - RNA, 20 nt, Artificial Sequence
  SAMD9L targeting guide sequence portion
uuucugguguucuguuuugg

SEQ ID NO: 8731 - RNA, 20 nt, Artificial Sequence
  SAMD9L targeting guide sequence portion
uuuggauuuuucugguguuc

SEQ ID NO: 8732 - RNA, 20 nt, Artificial Sequence
  SAMD9L targeting guide sequence portion
uuugguguguuuuggauuuu

SEQ ID NO: 8733 - RNA, 20 nt, Artificial Sequence
  SAMD9L targeting guide sequence portion
uuuucugguguucuguuuug

SEQ ID NO: 8734 - RNA, 20 nt, Artificial Sequence
  SAMD9L targeting guide sequence portion
uuuuggauuuuucugguguu

SEQ ID NO: 8735 - RNA, 20 nt, Artificial Sequence
  SAMD9L targeting guide sequence portion
uuuugguguguuuuggauuu

SEQ ID NO: 8736 - RNA, 20 nt, Artificial Sequence
  SAMD9L targeting guide sequence portion
uuuuucugguguucuguuuu

SEQ ID NO: 8737 - RNA, 20 nt, Artificial Sequence
  SAMD9L targeting guide sequence portion
uuuuugguguguuuuggauu

SEQ ID NO: 8738 - RNA, 21 nt, Artificial Sequence
  SAMD9L targeting guide sequence portion
aaaacagaacaccagaaaaau

SEQ ID NO: 8739 - RNA, 21 nt, Artificial Sequence
  SAMD9L targeting guide sequence portion
aaaaccguccaaaacagaaca

SEQ ID NO: 8740 - RNA, 21 nt, Artificial Sequence
  SAMD9L targeting guide sequence portion
aaacagaacaccagaaaaauc

SEQ ID NO: 8741 - RNA, 21 nt, Artificial Sequence
  SAMD9L targeting guide sequence portion
aaaccguccaaaacagaacac

SEQ ID NO: 8742 - RNA, 21 nt, Artificial Sequence
  SAMD9L targeting guide sequence portion
aacaccagaaaaauccaaaac

SEQ ID NO: 8743 - RNA, 21 nt, Artificial Sequence
  SAMD9L targeting guide sequence portion
aacagaacaccagaaaaaucc

SEQ ID NO: 8744 - RNA, 21 nt, Artificial Sequence
  SAMD9L targeting guide sequence portion
aaccguccaaaacagaacacc

SEQ ID NO: 8745 - RNA, 21 nt, Artificial Sequence
  SAMD9L targeting guide sequence portion
acaccagaaaaauccaaaaca

SEQ ID NO: 8746 - RNA, 21 nt, Artificial Sequence
  SAMD9L targeting guide sequence portion
acagaacaccagaaaaaucca

SEQ ID NO: 8747 - RNA, 21 nt, Artificial Sequence
  SAMD9L targeting guide sequence portion
accagaaaaauccaaaacaca

SEQ ID NO: 8748 - RNA, 21 nt, Artificial Sequence
  SAMD9L targeting guide sequence portion
accguccaaaacagaacacca

SEQ ID NO: 8749 - RNA, 21 nt, Artificial Sequence
  SAMD9L targeting guide sequence portion
agaaaaauccaaaacacacca

SEQ ID NO: 8750 - RNA, 21 nt, Artificial Sequence
  SAMD9L targeting guide sequence portion
agaacaccagaaaaauccaaa

SEQ ID NO: 8751 - RNA, 21 nt, Artificial Sequence
  SAMD9L targeting guide sequence portion
auuuuucugguguucuguuuu

SEQ ID NO: 8752 - RNA, 21 nt, Artificial Sequence
  SAMD9L targeting guide sequence portion
caaaacagaacaccagaaaaa

SEQ ID NO: 8753 - RNA, 21 nt, Artificial Sequence
  SAMD9L targeting guide sequence portion
caaaaccguccaaaacagaac

SEQ ID NO: 8754 - RNA, 21 nt, Artificial Sequence
  SAMD9L targeting guide sequence portion
caccagaaaaauccaaaacac

SEQ ID NO: 8755 - RNA, 21 nt, Artificial Sequence
  SAMD9L targeting guide sequence portion
cagaaaaauccaaaacacacc

SEQ ID NO: 8756 - RNA, 21 nt, Artificial Sequence
  SAMD9L targeting guide sequence portion
cagaacaccagaaaaauccaa

SEQ ID NO: 8757 - RNA, 21 nt, Artificial Sequence
  SAMD9L targeting guide sequence portion
ccaaaacagaacaccagaaaa

SEQ ID NO: 8758 - RNA, 21 nt, Artificial Sequence
  SAMD9L targeting guide sequence portion
ccagaaaaauccaaaacacac

SEQ ID NO: 8759 - RNA, 21 nt, Artificial Sequence
  SAMD9L targeting guide sequence portion
ccguccaaaacagaacaccag

SEQ ID NO: 8760 - RNA, 21 nt, Artificial Sequence
  SAMD9L targeting guide sequence portion
ccuuuuugguguguuuuggau

SEQ ID NO: 8761 - RNA, 21 nt, Artificial Sequence
  SAMD9L targeting guide sequence portion
cguccaaaacagaacaccaga

SEQ ID NO: 8762 - RNA, 21 nt, Artificial Sequence
  SAMD9L targeting guide sequence portion
cugguguucuguuuuggacgg

SEQ ID NO: 8763 - RNA, 21 nt, Artificial Sequence
  SAMD9L targeting guide sequence portion
cuuuuugguguguuuuggauu

SEQ ID NO: 8764 - RNA, 21 nt, Artificial Sequence
  SAMD9L targeting guide sequence portion
gaaaaauccaaaacacaccaa

SEQ ID NO: 8765 - RNA, 21 nt, Artificial Sequence
  SAMD9L targeting guide sequence portion
gaacaccagaaaaauccaaaa

SEQ ID NO: 8766 - RNA, 21 nt, Artificial Sequence
  SAMD9L targeting guide sequence portion
gauuuuucugguguucuguuu

SEQ ID NO: 8767 - RNA, 21 nt, Artificial Sequence
  SAMD9L targeting guide sequence portion
ggauuuuucugguguucuguu

SEQ ID NO: 8768 - RNA, 21 nt, Artificial Sequence
  SAMD9L targeting guide sequence portion
gguguguuuuggauuuuucug

SEQ ID NO: 8769 - RNA, 21 nt, Artificial Sequence
  SAMD9L targeting guide sequence portion
guccaaaacagaacaccagaa

SEQ ID NO: 8770 - RNA, 21 nt, Artificial Sequence
  SAMD9L targeting guide sequence portion
guguguuuuggauuuuucugg

SEQ ID NO: 8771 - RNA, 21 nt, Artificial Sequence
  SAMD9L targeting guide sequence portion
guguuuuggauuuuucuggug

SEQ ID NO: 8772 - RNA, 21 nt, Artificial Sequence
  SAMD9L targeting guide sequence portion
guuuuggauuuuucugguguu

SEQ ID NO: 8773 - RNA, 21 nt, Artificial Sequence
  SAMD9L targeting guide sequence portion
ucaaaaccguccaaaacagaa

SEQ ID NO: 8774 - RNA, 21 nt, Artificial Sequence
  SAMD9L targeting guide sequence portion
uccaaaacagaacaccagaaa

SEQ ID NO: 8775 - RNA, 21 nt, Artificial Sequence
  SAMD9L targeting guide sequence portion
uccuuuuugguguguuuugga

SEQ ID NO: 8776 - RNA, 21 nt, Artificial Sequence
  SAMD9L targeting guide sequence portion
ucugguguucuguuuuggacg

SEQ ID NO: 8777 - RNA, 21 nt, Artificial Sequence
  SAMD9L targeting guide sequence portion
uggauuuuucugguguucugu

SEQ ID NO: 8778 - RNA, 21 nt, Artificial Sequence
  SAMD9L targeting guide sequence portion
ugguguguuuuggauuuuucu

SEQ ID NO: 8779 - RNA, 21 nt, Artificial Sequence
  SAMD9L targeting guide sequence portion
uguguuuuggauuuuucuggu

SEQ ID NO: 8780 - RNA, 21 nt, Artificial Sequence
  SAMD9L targeting guide sequence portion
uguuuuggauuuuucuggugu

SEQ ID NO: 8781 - RNA, 21 nt, Artificial Sequence
  SAMD9L targeting guide sequence portion
uucugguguucuguuuuggac

SEQ ID NO: 8782 - RNA, 21 nt, Artificial Sequence
  SAMD9L targeting guide sequence portion
uuggauuuuucugguguucug

SEQ ID NO: 8783 - RNA, 21 nt, Artificial Sequence
  SAMD9L targeting guide sequence portion
uugguguguuuuggauuuuuc

SEQ ID NO: 8784 - RNA, 21 nt, Artificial Sequence
  SAMD9L targeting guide sequence portion
uuucugguguucuguuuugga

SEQ ID NO: 8785 - RNA, 21 nt, Artificial Sequence
  SAMD9L targeting guide sequence portion
uuuggauuuuucugguguucu

SEQ ID NO: 8786 - RNA, 21 nt, Artificial Sequence
  SAMD9L targeting guide sequence portion
uuugguguguuuuggauuuuu

SEQ ID NO: 8787 - RNA, 21 nt, Artificial Sequence
  SAMD9L targeting guide sequence portion
uuuucugguguucuguuuugg

SEQ ID NO: 8788 - RNA, 21 nt, Artificial Sequence
  SAMD9L targeting guide sequence portion
uuuuggauuuuucugguguuc

SEQ ID NO: 8789 - RNA, 21 nt, Artificial Sequence
  SAMD9L targeting guide sequence portion
uuuugguguguuuuggauuuu

SEQ ID NO: 8790 - RNA, 21 nt, Artificial Sequence
  SAMD9L targeting guide sequence portion
uuuuucugguguucuguuuug

SEQ ID NO: 8791 - RNA, 21 nt, Artificial Sequence
  SAMD9L targeting guide sequence portion
uuuuugguguguuuuggauuu

SEQ ID NO: 8792 - RNA, 22 nt, Artificial Sequence
  SAMD9L targeting guide sequence portion
aaaacagaacaccagaaaaauc

SEQ ID NO: 8793 - RNA, 22 nt, Artificial Sequence
  SAMD9L targeting guide sequence portion
aaaaccguccaaaacagaacac

SEQ ID NO: 8794 - RNA, 22 nt, Artificial Sequence
  SAMD9L targeting guide sequence portion
aaacagaacaccagaaaaaucc

SEQ ID NO: 8795 - RNA, 22 nt, Artificial Sequence
  SAMD9L targeting guide sequence portion
aaaccguccaaaacagaacacc

SEQ ID NO: 8796 - RNA, 22 nt, Artificial Sequence
  SAMD9L targeting guide sequence portion
aacaccagaaaaauccaaaaca

SEQ ID NO: 8797 - RNA, 22 nt, Artificial Sequence
  SAMD9L targeting guide sequence portion
aacagaacaccagaaaaaucca

SEQ ID NO: 8798 - RNA, 22 nt, Artificial Sequence
  SAMD9L targeting guide sequence portion
aaccguccaaaacagaacacca

SEQ ID NO: 8799 - RNA, 22 nt, Artificial Sequence
  SAMD9L targeting guide sequence portion
acaccagaaaaauccaaaacac

SEQ ID NO: 8800 - RNA, 22 nt, Artificial Sequence
  SAMD9L targeting guide sequence portion
acagaacaccagaaaaauccaa

SEQ ID NO: 8801 - RNA, 22 nt, Artificial Sequence
  SAMD9L targeting guide sequence portion
accagaaaaauccaaaacacac

SEQ ID NO: 8802 - RNA, 22 nt, Artificial Sequence
  SAMD9L targeting guide sequence portion
accguccaaaacagaacaccag

SEQ ID NO: 8803 - RNA, 22 nt, Artificial Sequence
  SAMD9L targeting guide sequence portion
agaaaaauccaaaacacaccaa

SEQ ID NO: 8804 - RNA, 22 nt, Artificial Sequence
  SAMD9L targeting guide sequence portion
agaacaccagaaaaauccaaaa

SEQ ID NO: 8805 - RNA, 22 nt, Artificial Sequence
  SAMD9L targeting guide sequence portion
auuuuucugguguucuguuuug

SEQ ID NO: 8806 - RNA, 22 nt, Artificial Sequence
  SAMD9L targeting guide sequence portion
caaaacagaacaccagaaaaau

SEQ ID NO: 8807 - RNA, 22 nt, Artificial Sequence
  SAMD9L targeting guide sequence portion
caaaaccguccaaaacagaaca

SEQ ID NO: 8808 - RNA, 22 nt, Artificial Sequence
  SAMD9L targeting guide sequence portion
caccagaaaaauccaaaacaca

SEQ ID NO: 8809 - RNA, 22 nt, Artificial Sequence
  SAMD9L targeting guide sequence portion
cagaaaaauccaaaacacacca

SEQ ID NO: 8810 - RNA, 22 nt, Artificial Sequence
  SAMD9L targeting guide sequence portion
cagaacaccagaaaaauccaaa

SEQ ID NO: 8811 - RNA, 22 nt, Artificial Sequence
  SAMD9L targeting guide sequence portion
ccaaaacagaacaccagaaaaa

SEQ ID NO: 8812 - RNA, 22 nt, Artificial Sequence
  SAMD9L targeting guide sequence portion
ccagaaaaauccaaaacacacc

SEQ ID NO: 8813 - RNA, 22 nt, Artificial Sequence
  SAMD9L targeting guide sequence portion
ccguccaaaacagaacaccaga

SEQ ID NO: 8814 - RNA, 22 nt, Artificial Sequence
  SAMD9L targeting guide sequence portion
ccuuuuugguguguuuuggauu

SEQ ID NO: 8815 - RNA, 22 nt, Artificial Sequence
  SAMD9L targeting guide sequence portion
cguccaaaacagaacaccagaa

SEQ ID NO: 8816 - RNA, 22 nt, Artificial Sequence
  SAMD9L targeting guide sequence portion
cugguguucuguuuuggacggu

SEQ ID NO: 8817 - RNA, 22 nt, Artificial Sequence
  SAMD9L targeting guide sequence portion
cuuuuugguguguuuuggauuu

SEQ ID NO: 8818 - RNA, 22 nt, Artificial Sequence
  SAMD9L targeting guide sequence portion
gaaaaauccaaaacacaccaaa

SEQ ID NO: 8819 - RNA, 22 nt, Artificial Sequence
  SAMD9L targeting guide sequence portion
gaacaccagaaaaauccaaaac

SEQ ID NO: 8820 - RNA, 22 nt, Artificial Sequence
  SAMD9L targeting guide sequence portion
gauuuuucugguguucuguuuu

SEQ ID NO: 8821 - RNA, 22 nt, Artificial Sequence
  SAMD9L targeting guide sequence portion
ggauuuuucugguguucuguuu

SEQ ID NO: 8822 - RNA, 22 nt, Artificial Sequence
  SAMD9L targeting guide sequence portion
gguguguuuuggauuuuucugg

SEQ ID NO: 8823 - RNA, 22 nt, Artificial Sequence
  SAMD9L targeting guide sequence portion
guccaaaacagaacaccagaaa

SEQ ID NO: 8824 - RNA, 22 nt, Artificial Sequence
  SAMD9L targeting guide sequence portion
guguguuuuggauuuuucuggu

SEQ ID NO: 8825 - RNA, 22 nt, Artificial Sequence
  SAMD9L targeting guide sequence portion
guguuuuggauuuuucuggugu

SEQ ID NO: 8826 - RNA, 22 nt, Artificial Sequence
  SAMD9L targeting guide sequence portion
guuuuggauuuuucugguguuc

SEQ ID NO: 8827 - RNA, 22 nt, Artificial Sequence
  SAMD9L targeting guide sequence portion
ucaaaaccguccaaaacagaac

SEQ ID NO: 8828 - RNA, 22 nt, Artificial Sequence
  SAMD9L targeting guide sequence portion
uccaaaacagaacaccagaaaa

SEQ ID NO: 8829 - RNA, 22 nt, Artificial Sequence
  SAMD9L targeting guide sequence portion
uccuuuuugguguguuuuggau

SEQ ID NO: 8830 - RNA, 22 nt, Artificial Sequence
  SAMD9L targeting guide sequence portion
ucugguguucuguuuuggacgg

SEQ ID NO: 8831 - RNA, 22 nt, Artificial Sequence
  SAMD9L targeting guide sequence portion
uggauuuuucugguguucuguu

SEQ ID NO: 8832 - RNA, 22 nt, Artificial Sequence
  SAMD9L targeting guide sequence portion
ugguguguuuuggauuuuucug

SEQ ID NO: 8833 - RNA, 22 nt, Artificial Sequence
  SAMD9L targeting guide sequence portion
uguguuuuggauuuuucuggug

SEQ ID NO: 8834 - RNA, 22 nt, Artificial Sequence
  SAMD9L targeting guide sequence portion
uguuuuggauuuuucugguguu

SEQ ID NO: 8835 - RNA, 22 nt, Artificial Sequence
  SAMD9L targeting guide sequence portion
uucaaaaccguccaaaacagaa

SEQ ID NO: 8836 - RNA, 22 nt, Artificial Sequence
  SAMD9L targeting guide sequence portion
uuccuuuuugguguguuuugga

SEQ ID NO: 8837 - RNA, 22 nt, Artificial Sequence
  SAMD9L targeting guide sequence portion
uucugguguucuguuuuggacg

SEQ ID NO: 8838 - RNA, 22 nt, Artificial Sequence
  SAMD9L targeting guide sequence portion
uuggauuuuucugguguucugu

SEQ ID NO: 8839 - RNA, 22 nt, Artificial Sequence
  SAMD9L targeting guide sequence portion
uugguguguuuuggauuuuucu

SEQ ID NO: 8840 - RNA, 22 nt, Artificial Sequence
  SAMD9L targeting guide sequence portion
uuucugguguucuguuuuggac

SEQ ID NO: 8841 - RNA, 22 nt, Artificial Sequence
  SAMD9L targeting guide sequence portion
uuuggauuuuucugguguucug

SEQ ID NO: 8842 - RNA, 22 nt, Artificial Sequence
  SAMD9L targeting guide sequence portion
uuugguguguuuuggauuuuuc

SEQ ID NO: 8843 - RNA, 22 nt, Artificial Sequence
  SAMD9L targeting guide sequence portion
uuuucugguguucuguuuugga

SEQ ID NO: 8844 - RNA, 22 nt, Artificial Sequence
  SAMD9L targeting guide sequence portion
uuuuggauuuuucugguguucu

SEQ ID NO: 8845 - RNA, 22 nt, Artificial Sequence
  SAMD9L targeting guide sequence portion
uuuugguguguuuuggauuuuu

SEQ ID NO: 8846 - RNA, 22 nt, Artificial Sequence
  SAMD9L targeting guide sequence portion
uuuuucugguguucuguuuugg

SEQ ID NO: 8847 - RNA, 22 nt, Artificial Sequence
  SAMD9L targeting guide sequence portion
uuuuugguguguuuuggauuuu

SEQ ID NO: 8848 - RNA, 20 nt, Artificial Sequence
  SAMD9L targeting guide sequence portion
aaaaaauccaaaacacacca

SEQ ID NO: 8849 - RNA, 20 nt, Artificial Sequence
  SAMD9L targeting guide sequence portion
caaaacagaacaccaaaaaa

SEQ ID NO: 8850 - RNA, 20 nt, Artificial Sequence
  SAMD9L targeting guide sequence portion
ccaaaacagaacaccaaaaa

SEQ ID NO: 8851 - RNA, 20 nt, Artificial Sequence
  SAMD9L targeting guide sequence portion
cguccaaaacagaacaccaa

SEQ ID NO: 8852 - RNA, 20 nt, Artificial Sequence
  SAMD9L targeting guide sequence portion
guccaaaacagaacaccaaa

SEQ ID NO: 8853 - RNA, 20 nt, Artificial Sequence
  SAMD9L targeting guide sequence portion
uccaaaacagaacaccaaaa

SEQ ID NO: 8854 - RNA, 20 nt, Artificial Sequence
  SAMD9L targeting guide sequence portion
ugguguguuuuggauuuuuu

SEQ ID NO: 8855 - RNA, 20 nt, Artificial Sequence
  SAMD9L targeting guide sequence portion
uugguguucuguuuuggacg

SEQ ID NO: 8856 - RNA, 20 nt, Artificial Sequence
  SAMD9L targeting guide sequence portion
uuugguguucuguuuuggac

SEQ ID NO: 8857 - RNA, 20 nt, Artificial Sequence
  SAMD9L targeting guide sequence portion
uuuugguguucuguuuugga

SEQ ID NO: 8858 - RNA, 20 nt, Artificial Sequence
  SAMD9L targeting guide sequence portion
uuuuugguguucuguuuugg

SEQ ID NO: 8859 - RNA, 20 nt, Artificial Sequence
  SAMD9L targeting guide sequence portion
uuuuuugguguucuguuuug

SEQ ID NO: 8860 - RNA, 21 nt, Artificial Sequence
  SAMD9L targeting guide sequence portion
aaaaaauccaaaacacaccaa

SEQ ID NO: 8861 - RNA, 21 nt, Artificial Sequence
  SAMD9L targeting guide sequence portion
ccaaaacagaacaccaaaaaa

SEQ ID NO: 8862 - RNA, 21 nt, Artificial Sequence
  SAMD9L targeting guide sequence portion
ccguccaaaacagaacaccaa

SEQ ID NO: 8863 - RNA, 21 nt, Artificial Sequence
  SAMD9L targeting guide sequence portion
cguccaaaacagaacaccaaa

SEQ ID NO: 8864 - RNA, 21 nt, Artificial Sequence
  SAMD9L targeting guide sequence portion
guccaaaacagaacaccaaaa

SEQ ID NO: 8865 - RNA, 21 nt, Artificial Sequence
  SAMD9L targeting guide sequence portion
uccaaaacagaacaccaaaaa

SEQ ID NO: 8866 - RNA, 21 nt, Artificial Sequence
  SAMD9L targeting guide sequence portion
uugguguguuuuggauuuuuu

SEQ ID NO: 8867 - RNA, 21 nt, Artificial Sequence
  SAMD9L targeting guide sequence portion
uugguguucuguuuuggacgg

SEQ ID NO: 8868 - RNA, 21 nt, Artificial Sequence
  SAMD9L targeting guide sequence portion
uuugguguucuguuuuggacg

SEQ ID NO: 8869 - RNA, 21 nt, Artificial Sequence
  SAMD9L targeting guide sequence portion
uuuugguguucuguuuuggac

SEQ ID NO: 8870 - RNA, 21 nt, Artificial Sequence
  SAMD9L targeting guide sequence portion
uuuuugguguucuguuuugga

SEQ ID NO: 8871 - RNA, 21 nt, Artificial Sequence
  SAMD9L targeting guide sequence portion
uuuuuugguguucuguuuugg

SEQ ID NO: 8872 - RNA, 22 nt, Artificial Sequence
  SAMD9L targeting guide sequence portion
aaaaaauccaaaacacaccaaa

SEQ ID NO: 8873 - RNA, 22 nt, Artificial Sequence
  SAMD9L targeting guide sequence portion
accguccaaaacagaacaccaa

SEQ ID NO: 8874 - RNA, 22 nt, Artificial Sequence
  SAMD9L targeting guide sequence portion
ccguccaaaacagaacaccaaa

SEQ ID NO: 8875 - RNA, 22 nt, Artificial Sequence
  SAMD9L targeting guide sequence portion
cguccaaaacagaacaccaaaa

SEQ ID NO: 8876 - RNA, 22 nt, Artificial Sequence
  SAMD9L targeting guide sequence portion
guccaaaacagaacaccaaaaa

SEQ ID NO: 8877 - RNA, 22 nt, Artificial Sequence
  SAMD9L targeting guide sequence portion
uccaaaacagaacaccaaaaaa

SEQ ID NO: 8878 - RNA, 22 nt, Artificial Sequence
  SAMD9L targeting guide sequence portion
uugguguucuguuuuggacggu

SEQ ID NO: 8879 - RNA, 22 nt, Artificial Sequence
  SAMD9L targeting guide sequence portion
uuugguguguuuuggauuuuuu

SEQ ID NO: 8880 - RNA, 22 nt, Artificial Sequence
  SAMD9L targeting guide sequence portion
uuugguguucuguuuuggacgg

SEQ ID NO: 8881 - RNA, 22 nt, Artificial Sequence
  SAMD9L targeting guide sequence portion
uuuugguguucuguuuuggacg

SEQ ID NO: 8882 - RNA, 22 nt, Artificial Sequence
  SAMD9L targeting guide sequence portion
uuuuugguguucuguuuuggac

SEQ ID NO: 8883 - RNA, 22 nt, Artificial Sequence
  SAMD9L targeting guide sequence portion
uuuuuugguguucuguuuugga

SEQ ID NO: 8884 - RNA, 20 nt, Artificial Sequence
  SAMD9L targeting guide sequence portion
aaaaaaaaaaacuuagguuc

SEQ ID NO: 8885 - RNA, 20 nt, Artificial Sequence
  SAMD9L targeting guide sequence portion
aaaaaacuuagguuccuuaa

SEQ ID NO: 8886 - RNA, 20 nt, Artificial Sequence
  SAMD9L targeting guide sequence portion
aaaaacuuagguuccuuaaa

SEQ ID NO: 8887 - RNA, 20 nt, Artificial Sequence
  SAMD9L targeting guide sequence portion
aaaacuuagguuccuuaaac

SEQ ID NO: 8888 - RNA, 20 nt, Artificial Sequence
  SAMD9L targeting guide sequence portion
aaacuuagguuccuuaaacc

SEQ ID NO: 8889 - RNA, 20 nt, Artificial Sequence
  SAMD9L targeting guide sequence portion
aacuuagguuccuuaaaccu

SEQ ID NO: 8890 - RNA, 20 nt, Artificial Sequence
  SAMD9L targeting guide sequence portion
acuuagguuccuuaaaccua

SEQ ID NO: 8891 - RNA, 20 nt, Artificial Sequence
  SAMD9L targeting guide sequence portion
agguuuaaggaaccuaaguu

SEQ ID NO: 8892 - RNA, 20 nt, Artificial Sequence
  SAMD9L targeting guide sequence portion
ccuuagguuuaaggaaccua

SEQ ID NO: 8893 - RNA, 20 nt, Artificial Sequence
  SAMD9L targeting guide sequence portion
cuuagguuccuuaaaccuaa

SEQ ID NO: 8894 - RNA, 20 nt, Artificial Sequence
  SAMD9L targeting guide sequence portion
cuuagguuuaaggaaccuaa

SEQ ID NO: 8895 - RNA, 20 nt, Artificial Sequence
  SAMD9L targeting guide sequence portion
gguuccuuagguuuaaggaa

SEQ ID NO: 8896 - RNA, 20 nt, Artificial Sequence
  SAMD9L targeting guide sequence portion
gguuuaaggaaccuaaguuu

SEQ ID NO: 8897 - RNA, 20 nt, Artificial Sequence
  SAMD9L targeting guide sequence portion
guuccuuagguuuaaggaac

SEQ ID NO: 8898 - RNA, 20 nt, Artificial Sequence
  SAMD9L targeting guide sequence portion
guuuaaggaaccuaaguuuu

SEQ ID NO: 8899 - RNA, 20 nt, Artificial Sequence
  SAMD9L targeting guide sequence portion
uagguuuaaggaaccuaagu

SEQ ID NO: 8900 - RNA, 20 nt, Artificial Sequence
  SAMD9L targeting guide sequence portion
uccuuagguuuaaggaaccu

SEQ ID NO: 8901 - RNA, 20 nt, Artificial Sequence
  SAMD9L targeting guide sequence portion
uuaaggaaccuaaguuuuuu

SEQ ID NO: 8902 - RNA, 20 nt, Artificial Sequence
  SAMD9L targeting guide sequence portion
uuagguuuaaggaaccuaag

SEQ ID NO: 8903 - RNA, 20 nt, Artificial Sequence
  SAMD9L targeting guide sequence portion
uuccuuagguuuaaggaacc

SEQ ID NO: 8904 - RNA, 20 nt, Artificial Sequence
  SAMD9L targeting guide sequence portion
uuuaaggaaccuaaguuuuu

SEQ ID NO: 8905 - RNA, 21 nt, Artificial Sequence
  SAMD9L targeting guide sequence portion
aaaaaaaaaaacuuagguucc

SEQ ID NO: 8906 - RNA, 21 nt, Artificial Sequence
  SAMD9L targeting guide sequence portion
aaaaaacuuagguuccuuaaa

SEQ ID NO: 8907 - RNA, 21 nt, Artificial Sequence
  SAMD9L targeting guide sequence portion
aaaaacuuagguuccuuaaac

SEQ ID NO: 8908 - RNA, 21 nt, Artificial Sequence
  SAMD9L targeting guide sequence portion
aaaacuuagguuccuuaaacc

SEQ ID NO: 8909 - RNA, 21 nt, Artificial Sequence
  SAMD9L targeting guide sequence portion
aaacuuagguuccuuaaaccu

SEQ ID NO: 8910 - RNA, 21 nt, Artificial Sequence
  SAMD9L targeting guide sequence portion
aacuuagguuccuuaaaccua

SEQ ID NO: 8911 - RNA, 21 nt, Artificial Sequence
  SAMD9L targeting guide sequence portion
acuuagguuccuuaaaccuaa

SEQ ID NO: 8912 - RNA, 21 nt, Artificial Sequence
  SAMD9L targeting guide sequence portion
agguuccuuagguuuaaggaa

SEQ ID NO: 8913 - RNA, 21 nt, Artificial Sequence
  SAMD9L targeting guide sequence portion
agguuuaaggaaccuaaguuu

SEQ ID NO: 8914 - RNA, 21 nt, Artificial Sequence
  SAMD9L targeting guide sequence portion
ccuuagguuuaaggaaccuaa

SEQ ID NO: 8915 - RNA, 21 nt, Artificial Sequence
  SAMD9L targeting guide sequence portion
cuuagguuccuuaaaccuaag

SEQ ID NO: 8916 - RNA, 21 nt, Artificial Sequence
  SAMD9L targeting guide sequence portion
cuuagguuuaaggaaccuaag

SEQ ID NO: 8917 - RNA, 21 nt, Artificial Sequence
  SAMD9L targeting guide sequence portion
ggaaccuaaguuuuuuuuuuu

SEQ ID NO: 8918 - RNA, 21 nt, Artificial Sequence
  SAMD9L targeting guide sequence portion
gguuccuuagguuuaaggaac

SEQ ID NO: 8919 - RNA, 21 nt, Artificial Sequence
  SAMD9L targeting guide sequence portion
gguuuaaggaaccuaaguuuu

SEQ ID NO: 8920 - RNA, 21 nt, Artificial Sequence
  SAMD9L targeting guide sequence portion
guuccuuagguuuaaggaacc

SEQ ID NO: 8921 - RNA, 21 nt, Artificial Sequence
  SAMD9L targeting guide sequence portion
guuuaaggaaccuaaguuuuu

SEQ ID NO: 8922 - RNA, 21 nt, Artificial Sequence
  SAMD9L targeting guide sequence portion
uagguuuaaggaaccuaaguu

SEQ ID NO: 8923 - RNA, 21 nt, Artificial Sequence
  SAMD9L targeting guide sequence portion
uccuuagguuuaaggaaccua

SEQ ID NO: 8924 - RNA, 21 nt, Artificial Sequence
  SAMD9L targeting guide sequence portion
uuagguuuaaggaaccuaagu

SEQ ID NO: 8925 - RNA, 21 nt, Artificial Sequence
  SAMD9L targeting guide sequence portion
uuccuuagguuuaaggaaccu

SEQ ID NO: 8926 - RNA, 21 nt, Artificial Sequence
  SAMD9L targeting guide sequence portion
uuuaaggaaccuaaguuuuuu

SEQ ID NO: 8927 - RNA, 22 nt, Artificial Sequence
  SAMD9L targeting guide sequence portion
aaaaaaaaaaaacuuagguucc

SEQ ID NO: 8928 - RNA, 22 nt, Artificial Sequence
  SAMD9L targeting guide sequence portion
aaaaaaaaaaacuuagguuccu

SEQ ID NO: 8929 - RNA, 22 nt, Artificial Sequence
  SAMD9L targeting guide sequence portion
aaaaaacuuagguuccuuaaac

SEQ ID NO: 8930 - RNA, 22 nt, Artificial Sequence
  SAMD9L targeting guide sequence portion
aaaaacuuagguuccuuaaacc

SEQ ID NO: 8931 - RNA, 22 nt, Artificial Sequence
  SAMD9L targeting guide sequence portion
aaaacuuagguuccuuaaaccu

SEQ ID NO: 8932 - RNA, 22 nt, Artificial Sequence
  SAMD9L targeting guide sequence portion
aaacuuagguuccuuaaaccua

SEQ ID NO: 8933 - RNA, 22 nt, Artificial Sequence
  SAMD9L targeting guide sequence portion
aacuuagguuccuuaaaccuaa

SEQ ID NO: 8934 - RNA, 22 nt, Artificial Sequence
  SAMD9L targeting guide sequence portion
acuuagguuccuuaaaccuaag

SEQ ID NO: 8935 - RNA, 22 nt, Artificial Sequence
  SAMD9L targeting guide sequence portion
aggaaccuaaguuuuuuuuuuu

SEQ ID NO: 8936 - RNA, 22 nt, Artificial Sequence
  SAMD9L targeting guide sequence portion
agguuccuuagguuuaaggaac

SEQ ID NO: 8937 - RNA, 22 nt, Artificial Sequence
  SAMD9L targeting guide sequence portion
agguuuaaggaaccuaaguuuu

SEQ ID NO: 8938 - RNA, 22 nt, Artificial Sequence
  SAMD9L targeting guide sequence portion
ccuuagguuuaaggaaccuaag

SEQ ID NO: 8939 - RNA, 22 nt, Artificial Sequence
  SAMD9L targeting guide sequence portion
cuuagguuccuuaaaccuaagg

SEQ ID NO: 8940 - RNA, 22 nt, Artificial Sequence
  SAMD9L targeting guide sequence portion
cuuagguuuaaggaaccuaagu

SEQ ID NO: 8941 - RNA, 22 nt, Artificial Sequence
  SAMD9L targeting guide sequence portion
ggaaccuaaguuuuuuuuuuuu

SEQ ID NO: 8942 - RNA, 22 nt, Artificial Sequence
  SAMD9L targeting guide sequence portion
gguuccuuagguuuaaggaacc

SEQ ID NO: 8943 - RNA, 22 nt, Artificial Sequence
  SAMD9L targeting guide sequence portion
gguuuaaggaaccuaaguuuuu

SEQ ID NO: 8944 - RNA, 22 nt, Artificial Sequence
  SAMD9L targeting guide sequence portion
guuccuuagguuuaaggaaccu

SEQ ID NO: 8945 - RNA, 22 nt, Artificial Sequence
  SAMD9L targeting guide sequence portion
guuuaaggaaccuaaguuuuuu

SEQ ID NO: 8946 - RNA, 22 nt, Artificial Sequence
  SAMD9L targeting guide sequence portion
uagguuccuuagguuuaaggaa

SEQ ID NO: 8947 - RNA, 22 nt, Artificial Sequence
  SAMD9L targeting guide sequence portion
uagguuuaaggaaccuaaguuu

SEQ ID NO: 8948 - RNA, 22 nt, Artificial Sequence
  SAMD9L targeting guide sequence portion
uccuuagguuuaaggaaccuaa

SEQ ID NO: 8949 - RNA, 22 nt, Artificial Sequence
  SAMD9L targeting guide sequence portion
uuagguuuaaggaaccuaaguu

SEQ ID NO: 8950 - RNA, 22 nt, Artificial Sequence
  SAMD9L targeting guide sequence portion
uuccuuagguuuaaggaaccua

SEQ ID NO: 8951 - RNA, 20 nt, Artificial Sequence
  SAMD9L targeting guide sequence portion
aagugacuucugucuacacu

SEQ ID NO: 8952 - RNA, 20 nt, Artificial Sequence
  SAMD9L targeting guide sequence portion
aauucaguucaucuguagug

SEQ ID NO: 8953 - RNA, 20 nt, Artificial Sequence
  SAMD9L targeting guide sequence portion
acaagugacuucugucuaca

SEQ ID NO: 8954 - RNA, 20 nt, Artificial Sequence
  SAMD9L targeting guide sequence portion
acacuacagaugaacugaau

SEQ ID NO: 8955 - RNA, 20 nt, Artificial Sequence
  SAMD9L targeting guide sequence portion
acccacaagugacuucuguc

SEQ ID NO: 8956 - RNA, 20 nt, Artificial Sequence
  SAMD9L targeting guide sequence portion
acuacagaugaacugaauug

SEQ ID NO: 8957 - RNA, 20 nt, Artificial Sequence
  SAMD9L targeting guide sequence portion
acuucugucuacacuacaga

SEQ ID NO: 8958 - RNA, 20 nt, Artificial Sequence
  SAMD9L targeting guide sequence portion
agacccacaagugacuucug

SEQ ID NO: 8959 - RNA, 20 nt, Artificial Sequence
  SAMD9L targeting guide sequence portion
agugacuucugucuacacua

SEQ ID NO: 8960 - RNA, 20 nt, Artificial Sequence
  SAMD9L targeting guide sequence portion
aguguagacagaagucacuu

SEQ ID NO: 8961 - RNA, 20 nt, Artificial Sequence
  SAMD9L targeting guide sequence portion
aguucaucuguaguguagac

SEQ ID NO: 8962 - RNA, 20 nt, Artificial Sequence
  SAMD9L targeting guide sequence portion
aucaauucaguucaucugua

SEQ ID NO: 8963 - RNA, 20 nt, Artificial Sequence
  SAMD9L targeting guide sequence portion
aucuguaguguagacagaag

SEQ ID NO: 8964 - RNA, 20 nt, Artificial Sequence
  SAMD9L targeting guide sequence portion
augaucaauucaguucaucu

SEQ ID NO: 8965 - RNA, 20 nt, Artificial Sequence
  SAMD9L targeting guide sequence portion
auucaguucaucuguagugu

SEQ ID NO: 8966 - RNA, 20 nt, Artificial Sequence
  SAMD9L targeting guide sequence portion
caagugacuucugucuacac

SEQ ID NO: 8967 - RNA, 20 nt, Artificial Sequence
  SAMD9L targeting guide sequence portion
caauucaguucaucuguagu

SEQ ID NO: 8968 - RNA, 20 nt, Artificial Sequence
  SAMD9L targeting guide sequence portion
cacaagugacuucugucuac

SEQ ID NO: 8969 - RNA, 20 nt, Artificial Sequence
  SAMD9L targeting guide sequence portion
cacuacagaugaacugaauu

SEQ ID NO: 8970 - RNA, 20 nt, Artificial Sequence
  SAMD9L targeting guide sequence portion
caguucaucuguaguguaga

SEQ ID NO: 8971 - RNA, 20 nt, Artificial Sequence
  SAMD9L targeting guide sequence portion
caucuguaguguagacagaa

SEQ ID NO: 8972 - RNA, 20 nt, Artificial Sequence
  SAMD9L targeting guide sequence portion
ccacaagugacuucugucua

SEQ ID NO: 8973 - RNA, 20 nt, Artificial Sequence
  SAMD9L targeting guide sequence portion
cccacaagugacuucugucu

SEQ ID NO: 8974 - RNA, 20 nt, Artificial Sequence
  SAMD9L targeting guide sequence portion
cuacacuacagaugaacuga

SEQ ID NO: 8975 - RNA, 20 nt, Artificial Sequence
  SAMD9L targeting guide sequence portion
cuguaguguagacagaaguc

SEQ ID NO: 8976 - RNA, 20 nt, Artificial Sequence
  SAMD9L targeting guide sequence portion
cugucuacacuacagaugaa

SEQ ID NO: 8977 - RNA, 20 nt, Artificial Sequence
  SAMD9L targeting guide sequence portion
cuucugucuacacuacagau

SEQ ID NO: 8978 - RNA, 20 nt, Artificial Sequence
  SAMD9L targeting guide sequence portion
gacccacaagugacuucugu

SEQ ID NO: 8979 - RNA, 20 nt, Artificial Sequence
  SAMD9L targeting guide sequence portion
gacuucugucuacacuacag

SEQ ID NO: 8980 - RNA, 20 nt, Artificial Sequence
  SAMD9L targeting guide sequence portion
gaucaauucaguucaucugu

SEQ ID NO: 8981 - RNA, 20 nt, Artificial Sequence
  SAMD9L targeting guide sequence portion
gaugaucaauucaguucauc

SEQ ID NO: 8982 - RNA, 20 nt, Artificial Sequence
  SAMD9L targeting guide sequence portion
guaguguagacagaagucac

SEQ ID NO: 8983 - RNA, 20 nt, Artificial Sequence
  SAMD9L targeting guide sequence portion
gucuacacuacagaugaacu

SEQ ID NO: 8984 - RNA, 20 nt, Artificial Sequence
  SAMD9L targeting guide sequence portion
gugacuucugucuacacuac

SEQ ID NO: 8985 - RNA, 20 nt, Artificial Sequence
  SAMD9L targeting guide sequence portion
guguagacagaagucacuug

SEQ ID NO: 8986 - RNA, 20 nt, Artificial Sequence
  SAMD9L targeting guide sequence portion
guucaucuguaguguagaca

SEQ ID NO: 8987 - RNA, 20 nt, Artificial Sequence
  SAMD9L targeting guide sequence portion
uacacuacagaugaacugaa

SEQ ID NO: 8988 - RNA, 20 nt, Artificial Sequence
  SAMD9L targeting guide sequence portion
uaguguagacagaagucacu

SEQ ID NO: 8989 - RNA, 20 nt, Artificial Sequence
  SAMD9L targeting guide sequence portion
ucaauucaguucaucuguag

SEQ ID NO: 8990 - RNA, 20 nt, Artificial Sequence
  SAMD9L targeting guide sequence portion
ucaguucaucuguaguguag

SEQ ID NO: 8991 - RNA, 20 nt, Artificial Sequence
  SAMD9L targeting guide sequence portion
ucaucuguaguguagacaga

SEQ ID NO: 8992 - RNA, 20 nt, Artificial Sequence
  SAMD9L targeting guide sequence portion
ucuacacuacagaugaacug

SEQ ID NO: 8993 - RNA, 20 nt, Artificial Sequence
  SAMD9L targeting guide sequence portion
ucuguaguguagacagaagu

SEQ ID NO: 8994 - RNA, 20 nt, Artificial Sequence
  SAMD9L targeting guide sequence portion
ucugucuacacuacagauga

SEQ ID NO: 8995 - RNA, 20 nt, Artificial Sequence
  SAMD9L targeting guide sequence portion
ugacuucugucuacacuaca

SEQ ID NO: 8996 - RNA, 20 nt, Artificial Sequence
  SAMD9L targeting guide sequence portion
ugaucaauucaguucaucug

SEQ ID NO: 8997 - RNA, 20 nt, Artificial Sequence
  SAMD9L targeting guide sequence portion
uguagacagaagucacuugu

SEQ ID NO: 8998 - RNA, 20 nt, Artificial Sequence
  SAMD9L targeting guide sequence portion
uguaguguagacagaaguca

SEQ ID NO: 8999 - RNA, 20 nt, Artificial Sequence
  SAMD9L targeting guide sequence portion
ugucuacacuacagaugaac

SEQ ID NO: 9000 - RNA, 20 nt, Artificial Sequence
  SAMD9L targeting guide sequence portion
uucaguucaucuguagugua

SEQ ID NO: 9001 - RNA, 20 nt, Artificial Sequence
  SAMD9L targeting guide sequence portion
uucaucuguaguguagacag

SEQ ID NO: 9002 - RNA, 20 nt, Artificial Sequence
  SAMD9L targeting guide sequence portion
uucugucuacacuacagaug

SEQ ID NO: 9003 - RNA, 21 nt, Artificial Sequence
  SAMD9L targeting guide sequence portion
aagacccacaagugacuucug

SEQ ID NO: 9004 - RNA, 21 nt, Artificial Sequence
  SAMD9L targeting guide sequence portion
aagugacuucugucuacacua

SEQ ID NO: 9005 - RNA, 21 nt, Artificial Sequence
  SAMD9L targeting guide sequence portion
aauucaguucaucuguagugu

SEQ ID NO: 9006 - RNA, 21 nt, Artificial Sequence
  SAMD9L targeting guide sequence portion
acaagugacuucugucuacac

SEQ ID NO: 9007 - RNA, 21 nt, Artificial Sequence
  SAMD9L targeting guide sequence portion
acacuacagaugaacugaauu

SEQ ID NO: 9008 - RNA, 21 nt, Artificial Sequence
  SAMD9L targeting guide sequence portion
acccacaagugacuucugucu

SEQ ID NO: 9009 - RNA, 21 nt, Artificial Sequence
  SAMD9L targeting guide sequence portion
acuacagaugaacugaauuga

SEQ ID NO: 9010 - RNA, 21 nt, Artificial Sequence
  SAMD9L targeting guide sequence portion
acuucugucuacacuacagau

SEQ ID NO: 9011 - RNA, 21 nt, Artificial Sequence
  SAMD9L targeting guide sequence portion
agacccacaagugacuucugu

SEQ ID NO: 9012 - RNA, 21 nt, Artificial Sequence
  SAMD9L targeting guide sequence portion
agaugaucaauucaguucauc

SEQ ID NO: 9013 - RNA, 21 nt, Artificial Sequence
  SAMD9L targeting guide sequence portion
agugacuucugucuacacuac

SEQ ID NO: 9014 - RNA, 21 nt, Artificial Sequence
  SAMD9L targeting guide sequence portion
aguguagacagaagucacuug

SEQ ID NO: 9015 - RNA, 21 nt, Artificial Sequence
  SAMD9L targeting guide sequence portion
aguucaucuguaguguagaca

SEQ ID NO: 9016 - RNA, 21 nt, Artificial Sequence
  SAMD9L targeting guide sequence portion
aucaauucaguucaucuguag

SEQ ID NO: 9017 - RNA, 21 nt, Artificial Sequence
  SAMD9L targeting guide sequence portion
aucuguaguguagacagaagu

SEQ ID NO: 9018 - RNA, 21 nt, Artificial Sequence
  SAMD9L targeting guide sequence portion
augaucaauucaguucaucug

SEQ ID NO: 9019 - RNA, 21 nt, Artificial Sequence
  SAMD9L targeting guide sequence portion
auucaguucaucuguagugua

SEQ ID NO: 9020 - RNA, 21 nt, Artificial Sequence
  SAMD9L targeting guide sequence portion
caagugacuucugucuacacu

SEQ ID NO: 9021 - RNA, 21 nt, Artificial Sequence
  SAMD9L targeting guide sequence portion
caauucaguucaucuguagug

SEQ ID NO: 9022 - RNA, 21 nt, Artificial Sequence
  SAMD9L targeting guide sequence portion
cacaagugacuucugucuaca

SEQ ID NO: 9023 - RNA, 21 nt, Artificial Sequence
  SAMD9L targeting guide sequence portion
cacuacagaugaacugaauug

SEQ ID NO: 9024 - RNA, 21 nt, Artificial Sequence
  SAMD9L targeting guide sequence portion
caguucaucuguaguguagac

SEQ ID NO: 9025 - RNA, 21 nt, Artificial Sequence
  SAMD9L targeting guide sequence portion
caucuguaguguagacagaag

SEQ ID NO: 9026 - RNA, 21 nt, Artificial Sequence
  SAMD9L targeting guide sequence portion
ccacaagugacuucugucuac

SEQ ID NO: 9027 - RNA, 21 nt, Artificial Sequence
  SAMD9L targeting guide sequence portion
cccacaagugacuucugucua

SEQ ID NO: 9028 - RNA, 21 nt, Artificial Sequence
  SAMD9L targeting guide sequence portion
cuacacuacagaugaacugaa

SEQ ID NO: 9029 - RNA, 21 nt, Artificial Sequence
  SAMD9L targeting guide sequence portion
cuguaguguagacagaaguca

SEQ ID NO: 9030 - RNA, 21 nt, Artificial Sequence
  SAMD9L targeting guide sequence portion
cugucuacacuacagaugaac

SEQ ID NO: 9031 - RNA, 21 nt, Artificial Sequence
  SAMD9L targeting guide sequence portion
cuucugucuacacuacagaug

SEQ ID NO: 9032 - RNA, 21 nt, Artificial Sequence
  SAMD9L targeting guide sequence portion
gacccacaagugacuucuguc

SEQ ID NO: 9033 - RNA, 21 nt, Artificial Sequence
  SAMD9L targeting guide sequence portion
gacuucugucuacacuacaga

SEQ ID NO: 9034 - RNA, 21 nt, Artificial Sequence
  SAMD9L targeting guide sequence portion
gaucaauucaguucaucugua

SEQ ID NO: 9035 - RNA, 21 nt, Artificial Sequence
  SAMD9L targeting guide sequence portion
gaugaucaauucaguucaucu

SEQ ID NO: 9036 - RNA, 21 nt, Artificial Sequence
  SAMD9L targeting guide sequence portion
guaguguagacagaagucacu

SEQ ID NO: 9037 - RNA, 21 nt, Artificial Sequence
  SAMD9L targeting guide sequence portion
gucuacacuacagaugaacug

SEQ ID NO: 9038 - RNA, 21 nt, Artificial Sequence
  SAMD9L targeting guide sequence portion
gugacuucugucuacacuaca

SEQ ID NO: 9039 - RNA, 21 nt, Artificial Sequence
  SAMD9L targeting guide sequence portion
guguagacagaagucacuugu

SEQ ID NO: 9040 - RNA, 21 nt, Artificial Sequence
  SAMD9L targeting guide sequence portion
guucaucuguaguguagacag

SEQ ID NO: 9041 - RNA, 21 nt, Artificial Sequence
  SAMD9L targeting guide sequence portion
uacacuacagaugaacugaau

SEQ ID NO: 9042 - RNA, 21 nt, Artificial Sequence
  SAMD9L targeting guide sequence portion
uaguguagacagaagucacuu

SEQ ID NO: 9043 - RNA, 21 nt, Artificial Sequence
  SAMD9L targeting guide sequence portion
ucaauucaguucaucuguagu

SEQ ID NO: 9044 - RNA, 21 nt, Artificial Sequence
  SAMD9L targeting guide sequence portion
ucaguucaucuguaguguaga

SEQ ID NO: 9045 - RNA, 21 nt, Artificial Sequence
  SAMD9L targeting guide sequence portion
ucaucuguaguguagacagaa

SEQ ID NO: 9046 - RNA, 21 nt, Artificial Sequence
  SAMD9L targeting guide sequence portion
ucuacacuacagaugaacuga

SEQ ID NO: 9047 - RNA, 21 nt, Artificial Sequence
  SAMD9L targeting guide sequence portion
ucuguaguguagacagaaguc

SEQ ID NO: 9048 - RNA, 21 nt, Artificial Sequence
  SAMD9L targeting guide sequence portion
ucugucuacacuacagaugaa

SEQ ID NO: 9049 - RNA, 21 nt, Artificial Sequence
  SAMD9L targeting guide sequence portion
ugacuucugucuacacuacag

SEQ ID NO: 9050 - RNA, 21 nt, Artificial Sequence
  SAMD9L targeting guide sequence portion
ugaucaauucaguucaucugu

SEQ ID NO: 9051 - RNA, 21 nt, Artificial Sequence
  SAMD9L targeting guide sequence portion
uguagacagaagucacuugug

SEQ ID NO: 9052 - RNA, 21 nt, Artificial Sequence
  SAMD9L targeting guide sequence portion
uguaguguagacagaagucac

SEQ ID NO: 9053 - RNA, 21 nt, Artificial Sequence
  SAMD9L targeting guide sequence portion
ugucuacacuacagaugaacu

SEQ ID NO: 9054 - RNA, 21 nt, Artificial Sequence
  SAMD9L targeting guide sequence portion
uucaguucaucuguaguguag

SEQ ID NO: 9055 - RNA, 21 nt, Artificial Sequence
  SAMD9L targeting guide sequence portion
uucaucuguaguguagacaga

SEQ ID NO: 9056 - RNA, 21 nt, Artificial Sequence
  SAMD9L targeting guide sequence portion
uucugucuacacuacagauga

SEQ ID NO: 9057 - RNA, 22 nt, Artificial Sequence
  SAMD9L targeting guide sequence portion
aagacccacaagugacuucugu

SEQ ID NO: 9058 - RNA, 22 nt, Artificial Sequence
  SAMD9L targeting guide sequence portion
aagugacuucugucuacacuac

SEQ ID NO: 9059 - RNA, 22 nt, Artificial Sequence
  SAMD9L targeting guide sequence portion
aauucaguucaucuguagugua

SEQ ID NO: 9060 - RNA, 22 nt, Artificial Sequence
  SAMD9L targeting guide sequence portion
acaagugacuucugucuacacu

SEQ ID NO: 9061 - RNA, 22 nt, Artificial Sequence
  SAMD9L targeting guide sequence portion
acacuacagaugaacugaauug

SEQ ID NO: 9062 - RNA, 22 nt, Artificial Sequence
  SAMD9L targeting guide sequence portion
acccacaagugacuucugucua

SEQ ID NO: 9063 - RNA, 22 nt, Artificial Sequence
  SAMD9L targeting guide sequence portion
acuacagaugaacugaauugau

SEQ ID NO: 9064 - RNA, 22 nt, Artificial Sequence
  SAMD9L targeting guide sequence portion
acuucugucuacacuacagaug

SEQ ID NO: 9065 - RNA, 22 nt, Artificial Sequence
  SAMD9L targeting guide sequence portion
agacccacaagugacuucuguc

SEQ ID NO: 9066 - RNA, 22 nt, Artificial Sequence
  SAMD9L targeting guide sequence portion
agaugaucaauucaguucaucu

SEQ ID NO: 9067 - RNA, 22 nt, Artificial Sequence
  SAMD9L targeting guide sequence portion
agugacuucugucuacacuaca

SEQ ID NO: 9068 - RNA, 22 nt, Artificial Sequence
  SAMD9L targeting guide sequence portion
aguguagacagaagucacuugu

SEQ ID NO: 9069 - RNA, 22 nt, Artificial Sequence
  SAMD9L targeting guide sequence portion
aguucaucuguaguguagacag

SEQ ID NO: 9070 - RNA, 22 nt, Artificial Sequence
  SAMD9L targeting guide sequence portion
aucaauucaguucaucuguagu

SEQ ID NO: 9071 - RNA, 22 nt, Artificial Sequence
  SAMD9L targeting guide sequence portion
aucuguaguguagacagaaguc

SEQ ID NO: 9072 - RNA, 22 nt, Artificial Sequence
  SAMD9L targeting guide sequence portion
augaucaauucaguucaucugu

SEQ ID NO: 9073 - RNA, 22 nt, Artificial Sequence
  SAMD9L targeting guide sequence portion
auucaguucaucuguaguguag

SEQ ID NO: 9074 - RNA, 22 nt, Artificial Sequence
  SAMD9L targeting guide sequence portion
caagugacuucugucuacacua

SEQ ID NO: 9075 - RNA, 22 nt, Artificial Sequence
  SAMD9L targeting guide sequence portion
caauucaguucaucuguagugu

SEQ ID NO: 9076 - RNA, 22 nt, Artificial Sequence
  SAMD9L targeting guide sequence portion
cacaagugacuucugucuacac

SEQ ID NO: 9077 - RNA, 22 nt, Artificial Sequence
  SAMD9L targeting guide sequence portion
cacuacagaugaacugaauuga

SEQ ID NO: 9078 - RNA, 22 nt, Artificial Sequence
  SAMD9L targeting guide sequence portion
caguucaucuguaguguagaca

SEQ ID NO: 9079 - RNA, 22 nt, Artificial Sequence
  SAMD9L targeting guide sequence portion
caucuguaguguagacagaagu

SEQ ID NO: 9080 - RNA, 22 nt, Artificial Sequence
  SAMD9L targeting guide sequence portion
ccacaagugacuucugucuaca

SEQ ID NO: 9081 - RNA, 22 nt, Artificial Sequence
  SAMD9L targeting guide sequence portion
cccacaagugacuucugucuac

SEQ ID NO: 9082 - RNA, 22 nt, Artificial Sequence
  SAMD9L targeting guide sequence portion
cuacacuacagaugaacugaau

SEQ ID NO: 9083 - RNA, 22 nt, Artificial Sequence
  SAMD9L targeting guide sequence portion
cuguaguguagacagaagucac

SEQ ID NO: 9084 - RNA, 22 nt, Artificial Sequence
  SAMD9L targeting guide sequence portion
cugucuacacuacagaugaacu

SEQ ID NO: 9085 - RNA, 22 nt, Artificial Sequence
  SAMD9L targeting guide sequence portion
cuucugucuacacuacagauga

SEQ ID NO: 9086 - RNA, 22 nt, Artificial Sequence
  SAMD9L targeting guide sequence portion
gacccacaagugacuucugucu

SEQ ID NO: 9087 - RNA, 22 nt, Artificial Sequence
  SAMD9L targeting guide sequence portion
gacuucugucuacacuacagau

SEQ ID NO: 9088 - RNA, 22 nt, Artificial Sequence
  SAMD9L targeting guide sequence portion
gaucaauucaguucaucuguag

SEQ ID NO: 9089 - RNA, 22 nt, Artificial Sequence
  SAMD9L targeting guide sequence portion
gaugaucaauucaguucaucug

SEQ ID NO: 9090 - RNA, 22 nt, Artificial Sequence
  SAMD9L targeting guide sequence portion
guaguguagacagaagucacuu

SEQ ID NO: 9091 - RNA, 22 nt, Artificial Sequence
  SAMD9L targeting guide sequence portion
gucuacacuacagaugaacuga

SEQ ID NO: 9092 - RNA, 22 nt, Artificial Sequence
  SAMD9L targeting guide sequence portion
gugacuucugucuacacuacag

SEQ ID NO: 9093 - RNA, 22 nt, Artificial Sequence
  SAMD9L targeting guide sequence portion
guguagacagaagucacuugug

SEQ ID NO: 9094 - RNA, 22 nt, Artificial Sequence
  SAMD9L targeting guide sequence portion
guucaucuguaguguagacaga

SEQ ID NO: 9095 - RNA, 22 nt, Artificial Sequence
  SAMD9L targeting guide sequence portion
uaagacccacaagugacuucug

SEQ ID NO: 9096 - RNA, 22 nt, Artificial Sequence
  SAMD9L targeting guide sequence portion
uacacuacagaugaacugaauu

SEQ ID NO: 9097 - RNA, 22 nt, Artificial Sequence
  SAMD9L targeting guide sequence portion
uagaugaucaauucaguucauc

SEQ ID NO: 9098 - RNA, 22 nt, Artificial Sequence
  SAMD9L targeting guide sequence portion
uaguguagacagaagucacuug

SEQ ID NO: 9099 - RNA, 22 nt, Artificial Sequence
  SAMD9L targeting guide sequence portion
ucaauucaguucaucuguagug

SEQ ID NO: 9100 - RNA, 22 nt, Artificial Sequence
  SAMD9L targeting guide sequence portion
ucaguucaucuguaguguagac

SEQ ID NO: 9101 - RNA, 22 nt, Artificial Sequence
  SAMD9L targeting guide sequence portion
ucaucuguaguguagacagaag

SEQ ID NO: 9102 - RNA, 22 nt, Artificial Sequence
  SAMD9L targeting guide sequence portion
ucuacacuacagaugaacugaa

SEQ ID NO: 9103 - RNA, 22 nt, Artificial Sequence
  SAMD9L targeting guide sequence portion
ucuguaguguagacagaaguca

SEQ ID NO: 9104 - RNA, 22 nt, Artificial Sequence
  SAMD9L targeting guide sequence portion
ucugucuacacuacagaugaac

SEQ ID NO: 9105 - RNA, 22 nt, Artificial Sequence
  SAMD9L targeting guide sequence portion
ugacuucugucuacacuacaga

SEQ ID NO: 9106 - RNA, 22 nt, Artificial Sequence
  SAMD9L targeting guide sequence portion
ugaucaauucaguucaucugua

SEQ ID NO: 9107 - RNA, 22 nt, Artificial Sequence
  SAMD9L targeting guide sequence portion
uguagacagaagucacuugugg

SEQ ID NO: 9108 - RNA, 22 nt, Artificial Sequence
  SAMD9L targeting guide sequence portion
uguaguguagacagaagucacu

SEQ ID NO: 9109 - RNA, 22 nt, Artificial Sequence
  SAMD9L targeting guide sequence portion
ugucuacacuacagaugaacug

SEQ ID NO: 9110 - RNA, 22 nt, Artificial Sequence
  SAMD9L targeting guide sequence portion
uucaguucaucuguaguguaga

SEQ ID NO: 9111 - RNA, 22 nt, Artificial Sequence
  SAMD9L targeting guide sequence portion
uucaucuguaguguagacagaa

SEQ ID NO: 9112 - RNA, 22 nt, Artificial Sequence
  SAMD9L targeting guide sequence portion
uucugucuacacuacagaugaa

SEQ ID NO: 9113 - RNA, 20 nt, Artificial Sequence
  SAMD9L targeting guide sequence portion
aagugacuucugucuacgcu

SEQ ID NO: 9114 - RNA, 20 nt, Artificial Sequence
  SAMD9L targeting guide sequence portion
aauucaguucaucuguagcg

SEQ ID NO: 9115 - RNA, 20 nt, Artificial Sequence
  SAMD9L targeting guide sequence portion
acaagugacuucugucuacg

SEQ ID NO: 9116 - RNA, 20 nt, Artificial Sequence
  SAMD9L targeting guide sequence portion
acgcuacagaugaacugaau

SEQ ID NO: 9117 - RNA, 20 nt, Artificial Sequence
  SAMD9L targeting guide sequence portion
acuucugucuacgcuacaga

SEQ ID NO: 9118 - RNA, 20 nt, Artificial Sequence
  SAMD9L targeting guide sequence portion
agcguagacagaagucacuu

SEQ ID NO: 9119 - RNA, 20 nt, Artificial Sequence
  SAMD9L targeting guide sequence portion
agugacuucugucuacgcua

SEQ ID NO: 9120 - RNA, 20 nt, Artificial Sequence
  SAMD9L targeting guide sequence portion
aguucaucuguagcguagac

SEQ ID NO: 9121 - RNA, 20 nt, Artificial Sequence
  SAMD9L targeting guide sequence portion
aucuguagcguagacagaag

SEQ ID NO: 9122 - RNA, 20 nt, Artificial Sequence
  SAMD9L targeting guide sequence portion
auucaguucaucuguagcgu

SEQ ID NO: 9123 - RNA, 20 nt, Artificial Sequence
  SAMD9L targeting guide sequence portion
caagugacuucugucuacgc

SEQ ID NO: 9124 - RNA, 20 nt, Artificial Sequence
  SAMD9L targeting guide sequence portion
caauucaguucaucuguagc

SEQ ID NO: 9125 - RNA, 20 nt, Artificial Sequence
  SAMD9L targeting guide sequence portion
caguucaucuguagcguaga

SEQ ID NO: 9126 - RNA, 20 nt, Artificial Sequence
  SAMD9L targeting guide sequence portion
caucuguagcguagacagaa

SEQ ID NO: 9127 - RNA, 20 nt, Artificial Sequence
  SAMD9L targeting guide sequence portion
cgcuacagaugaacugaauu

SEQ ID NO: 9128 - RNA, 20 nt, Artificial Sequence
  SAMD9L targeting guide sequence portion
cguagacagaagucacuugu

SEQ ID NO: 9129 - RNA, 20 nt, Artificial Sequence
  SAMD9L targeting guide sequence portion
cuacgcuacagaugaacuga

SEQ ID NO: 9130 - RNA, 20 nt, Artificial Sequence
  SAMD9L targeting guide sequence portion
cuguagcguagacagaaguc

SEQ ID NO: 9131 - RNA, 20 nt, Artificial Sequence
  SAMD9L targeting guide sequence portion
cugucuacgcuacagaugaa

SEQ ID NO: 9132 - RNA, 20 nt, Artificial Sequence
  SAMD9L targeting guide sequence portion
cuucugucuacgcuacagau

SEQ ID NO: 9133 - RNA, 20 nt, Artificial Sequence
  SAMD9L targeting guide sequence portion
gacuucugucuacgcuacag

SEQ ID NO: 9134 - RNA, 20 nt, Artificial Sequence
  SAMD9L targeting guide sequence portion
gcguagacagaagucacuug

SEQ ID NO: 9135 - RNA, 20 nt, Artificial Sequence
  SAMD9L targeting guide sequence portion
gcuacagaugaacugaauug

SEQ ID NO: 9136 - RNA, 20 nt, Artificial Sequence
  SAMD9L targeting guide sequence portion
guagcguagacagaagucac

SEQ ID NO: 9137 - RNA, 20 nt, Artificial Sequence
  SAMD9L targeting guide sequence portion
gucuacgcuacagaugaacu

SEQ ID NO: 9138 - RNA, 20 nt, Artificial Sequence
  SAMD9L targeting guide sequence portion
gugacuucugucuacgcuac

SEQ ID NO: 9139 - RNA, 20 nt, Artificial Sequence
  SAMD9L targeting guide sequence portion
guucaucuguagcguagaca

SEQ ID NO: 9140 - RNA, 20 nt, Artificial Sequence
  SAMD9L targeting guide sequence portion
uacgcuacagaugaacugaa

SEQ ID NO: 9141 - RNA, 20 nt, Artificial Sequence
  SAMD9L targeting guide sequence portion
uagcguagacagaagucacu

SEQ ID NO: 9142 - RNA, 20 nt, Artificial Sequence
  SAMD9L targeting guide sequence portion
ucaguucaucuguagcguag

SEQ ID NO: 9143 - RNA, 20 nt, Artificial Sequence
  SAMD9L targeting guide sequence portion
ucaucuguagcguagacaga

SEQ ID NO: 9144 - RNA, 20 nt, Artificial Sequence
  SAMD9L targeting guide sequence portion
ucuacgcuacagaugaacug

SEQ ID NO: 9145 - RNA, 20 nt, Artificial Sequence
  SAMD9L targeting guide sequence portion
ucuguagcguagacagaagu

SEQ ID NO: 9146 - RNA, 20 nt, Artificial Sequence
  SAMD9L targeting guide sequence portion
ucugucuacgcuacagauga

SEQ ID NO: 9147 - RNA, 20 nt, Artificial Sequence
  SAMD9L targeting guide sequence portion
ugacuucugucuacgcuaca

SEQ ID NO: 9148 - RNA, 20 nt, Artificial Sequence
  SAMD9L targeting guide sequence portion
uguagcguagacagaaguca

SEQ ID NO: 9149 - RNA, 20 nt, Artificial Sequence
  SAMD9L targeting guide sequence portion
ugucuacgcuacagaugaac

SEQ ID NO: 9150 - RNA, 20 nt, Artificial Sequence
  SAMD9L targeting guide sequence portion
uucaguucaucuguagcgua

SEQ ID NO: 9151 - RNA, 20 nt, Artificial Sequence
  SAMD9L targeting guide sequence portion
uucaucuguagcguagacag

SEQ ID NO: 9152 - RNA, 20 nt, Artificial Sequence
  SAMD9L targeting guide sequence portion
uucugucuacgcuacagaug

SEQ ID NO: 9153 - RNA, 21 nt, Artificial Sequence
  SAMD9L targeting guide sequence portion
aagugacuucugucuacgcua

SEQ ID NO: 9154 - RNA, 21 nt, Artificial Sequence
  SAMD9L targeting guide sequence portion
aauucaguucaucuguagcgu

SEQ ID NO: 9155 - RNA, 21 nt, Artificial Sequence
  SAMD9L targeting guide sequence portion
acaagugacuucugucuacgc

SEQ ID NO: 9156 - RNA, 21 nt, Artificial Sequence
  SAMD9L targeting guide sequence portion
acgcuacagaugaacugaauu

SEQ ID NO: 9157 - RNA, 21 nt, Artificial Sequence
  SAMD9L targeting guide sequence portion
acuucugucuacgcuacagau

SEQ ID NO: 9158 - RNA, 21 nt, Artificial Sequence
  SAMD9L targeting guide sequence portion
agcguagacagaagucacuug

SEQ ID NO: 9159 - RNA, 21 nt, Artificial Sequence
  SAMD9L targeting guide sequence portion
agugacuucugucuacgcuac

SEQ ID NO: 9160 - RNA, 21 nt, Artificial Sequence
  SAMD9L targeting guide sequence portion
aguucaucuguagcguagaca

SEQ ID NO: 9161 - RNA, 21 nt, Artificial Sequence
  SAMD9L targeting guide sequence portion
aucuguagcguagacagaagu

SEQ ID NO: 9162 - RNA, 21 nt, Artificial Sequence
  SAMD9L targeting guide sequence portion
auucaguucaucuguagcgua

SEQ ID NO: 9163 - RNA, 21 nt, Artificial Sequence
  SAMD9L targeting guide sequence portion
caagugacuucugucuacgcu

SEQ ID NO: 9164 - RNA, 21 nt, Artificial Sequence
  SAMD9L targeting guide sequence portion
caauucaguucaucuguagcg

SEQ ID NO: 9165 - RNA, 21 nt, Artificial Sequence
  SAMD9L targeting guide sequence portion
cacaagugacuucugucuacg

SEQ ID NO: 9166 - RNA, 21 nt, Artificial Sequence
  SAMD9L targeting guide sequence portion
caguucaucuguagcguagac

SEQ ID NO: 9167 - RNA, 21 nt, Artificial Sequence
  SAMD9L targeting guide sequence portion
caucuguagcguagacagaag

SEQ ID NO: 9168 - RNA, 21 nt, Artificial Sequence
  SAMD9L targeting guide sequence portion
cgcuacagaugaacugaauug

SEQ ID NO: 9169 - RNA, 21 nt, Artificial Sequence
  SAMD9L targeting guide sequence portion
cguagacagaagucacuugug

SEQ ID NO: 9170 - RNA, 21 nt, Artificial Sequence
  SAMD9L targeting guide sequence portion
cuacgcuacagaugaacugaa

SEQ ID NO: 9171 - RNA, 21 nt, Artificial Sequence
  SAMD9L targeting guide sequence portion
cuguagcguagacagaaguca

SEQ ID NO: 9172 - RNA, 21 nt, Artificial Sequence
  SAMD9L targeting guide sequence portion
cugucuacgcuacagaugaac

SEQ ID NO: 9173 - RNA, 21 nt, Artificial Sequence
  SAMD9L targeting guide sequence portion
cuucugucuacgcuacagaug

SEQ ID NO: 9174 - RNA, 21 nt, Artificial Sequence
  SAMD9L targeting guide sequence portion
gacuucugucuacgcuacaga

SEQ ID NO: 9175 - RNA, 21 nt, Artificial Sequence
  SAMD9L targeting guide sequence portion
gcguagacagaagucacuugu

SEQ ID NO: 9176 - RNA, 21 nt, Artificial Sequence
  SAMD9L targeting guide sequence portion
gcuacagaugaacugaauuga

SEQ ID NO: 9177 - RNA, 21 nt, Artificial Sequence
  SAMD9L targeting guide sequence portion
guagcguagacagaagucacu

SEQ ID NO: 9178 - RNA, 21 nt, Artificial Sequence
  SAMD9L targeting guide sequence portion
gucuacgcuacagaugaacug

SEQ ID NO: 9179 - RNA, 21 nt, Artificial Sequence
  SAMD9L targeting guide sequence portion
gugacuucugucuacgcuaca

SEQ ID NO: 9180 - RNA, 21 nt, Artificial Sequence
  SAMD9L targeting guide sequence portion
guucaucuguagcguagacag

SEQ ID NO: 9181 - RNA, 21 nt, Artificial Sequence
  SAMD9L targeting guide sequence portion
uacgcuacagaugaacugaau

SEQ ID NO: 9182 - RNA, 21 nt, Artificial Sequence
  SAMD9L targeting guide sequence portion
uagcguagacagaagucacuu

SEQ ID NO: 9183 - RNA, 21 nt, Artificial Sequence
  SAMD9L targeting guide sequence portion
ucaauucaguucaucuguagc

SEQ ID NO: 9184 - RNA, 21 nt, Artificial Sequence
  SAMD9L targeting guide sequence portion
ucaguucaucuguagcguaga

SEQ ID NO: 9185 - RNA, 21 nt, Artificial Sequence
  SAMD9L targeting guide sequence portion
ucaucuguagcguagacagaa

SEQ ID NO: 9186 - RNA, 21 nt, Artificial Sequence
  SAMD9L targeting guide sequence portion
ucuacgcuacagaugaacuga

SEQ ID NO: 9187 - RNA, 21 nt, Artificial Sequence
  SAMD9L targeting guide sequence portion
ucuguagcguagacagaaguc

SEQ ID NO: 9188 - RNA, 21 nt, Artificial Sequence
  SAMD9L targeting guide sequence portion
ucugucuacgcuacagaugaa

SEQ ID NO: 9189 - RNA, 21 nt, Artificial Sequence
  SAMD9L targeting guide sequence portion
ugacuucugucuacgcuacag

SEQ ID NO: 9190 - RNA, 21 nt, Artificial Sequence
  SAMD9L targeting guide sequence portion
uguagcguagacagaagucac

SEQ ID NO: 9191 - RNA, 21 nt, Artificial Sequence
  SAMD9L targeting guide sequence portion
ugucuacgcuacagaugaacu

SEQ ID NO: 9192 - RNA, 21 nt, Artificial Sequence
  SAMD9L targeting guide sequence portion
uucaguucaucuguagcguag

SEQ ID NO: 9193 - RNA, 21 nt, Artificial Sequence
  SAMD9L targeting guide sequence portion
uucaucuguagcguagacaga

SEQ ID NO: 9194 - RNA, 21 nt, Artificial Sequence
  SAMD9L targeting guide sequence portion
uucugucuacgcuacagauga

SEQ ID NO: 9195 - RNA, 22 nt, Artificial Sequence
  SAMD9L targeting guide sequence portion
aagugacuucugucuacgcuac

SEQ ID NO: 9196 - RNA, 22 nt, Artificial Sequence
  SAMD9L targeting guide sequence portion
aauucaguucaucuguagcgua

SEQ ID NO: 9197 - RNA, 22 nt, Artificial Sequence
  SAMD9L targeting guide sequence portion
acaagugacuucugucuacgcu

SEQ ID NO: 9198 - RNA, 22 nt, Artificial Sequence
  SAMD9L targeting guide sequence portion
acgcuacagaugaacugaauug

SEQ ID NO: 9199 - RNA, 22 nt, Artificial Sequence
  SAMD9L targeting guide sequence portion
acuucugucuacgcuacagaug

SEQ ID NO: 9200 - RNA, 22 nt, Artificial Sequence
  SAMD9L targeting guide sequence portion
agcguagacagaagucacuugu

SEQ ID NO: 9201 - RNA, 22 nt, Artificial Sequence
  SAMD9L targeting guide sequence portion
agugacuucugucuacgcuaca

SEQ ID NO: 9202 - RNA, 22 nt, Artificial Sequence
  SAMD9L targeting guide sequence portion
aguucaucuguagcguagacag

SEQ ID NO: 9203 - RNA, 22 nt, Artificial Sequence
  SAMD9L targeting guide sequence portion
aucaauucaguucaucuguagc

SEQ ID NO: 9204 - RNA, 22 nt, Artificial Sequence
  SAMD9L targeting guide sequence portion
aucuguagcguagacagaaguc

SEQ ID NO: 9205 - RNA, 22 nt, Artificial Sequence
  SAMD9L targeting guide sequence portion
auucaguucaucuguagcguag

SEQ ID NO: 9206 - RNA, 22 nt, Artificial Sequence
  SAMD9L targeting guide sequence portion
caagugacuucugucuacgcua

SEQ ID NO: 9207 - RNA, 22 nt, Artificial Sequence
  SAMD9L targeting guide sequence portion
caauucaguucaucuguagcgu

SEQ ID NO: 9208 - RNA, 22 nt, Artificial Sequence
  SAMD9L targeting guide sequence portion
cacaagugacuucugucuacgc

SEQ ID NO: 9209 - RNA, 22 nt, Artificial Sequence
  SAMD9L targeting guide sequence portion
caguucaucuguagcguagaca

SEQ ID NO: 9210 - RNA, 22 nt, Artificial Sequence
  SAMD9L targeting guide sequence portion
caucuguagcguagacagaagu

SEQ ID NO: 9211 - RNA, 22 nt, Artificial Sequence
  SAMD9L targeting guide sequence portion
ccacaagugacuucugucuacg

SEQ ID NO: 9212 - RNA, 22 nt, Artificial Sequence
  SAMD9L targeting guide sequence portion
cgcuacagaugaacugaauuga

SEQ ID NO: 9213 - RNA, 22 nt, Artificial Sequence
  SAMD9L targeting guide sequence portion
cguagacagaagucacuugugg

SEQ ID NO: 9214 - RNA, 22 nt, Artificial Sequence
  SAMD9L targeting guide sequence portion
cuacgcuacagaugaacugaau

SEQ ID NO: 9215 - RNA, 22 nt, Artificial Sequence
  SAMD9L targeting guide sequence portion
cuguagcguagacagaagucac

SEQ ID NO: 9216 - RNA, 22 nt, Artificial Sequence
  SAMD9L targeting guide sequence portion
cugucuacgcuacagaugaacu

SEQ ID NO: 9217 - RNA, 22 nt, Artificial Sequence
  SAMD9L targeting guide sequence portion
cuucugucuacgcuacagauga

SEQ ID NO: 9218 - RNA, 22 nt, Artificial Sequence
  SAMD9L targeting guide sequence portion
gacuucugucuacgcuacagau

SEQ ID NO: 9219 - RNA, 22 nt, Artificial Sequence
  SAMD9L targeting guide sequence portion
gcguagacagaagucacuugug

SEQ ID NO: 9220 - RNA, 22 nt, Artificial Sequence
  SAMD9L targeting guide sequence portion
gcuacagaugaacugaauugau

SEQ ID NO: 9221 - RNA, 22 nt, Artificial Sequence
  SAMD9L targeting guide sequence portion
guagcguagacagaagucacuu

SEQ ID NO: 9222 - RNA, 22 nt, Artificial Sequence
  SAMD9L targeting guide sequence portion
gucuacgcuacagaugaacuga

SEQ ID NO: 9223 - RNA, 22 nt, Artificial Sequence
  SAMD9L targeting guide sequence portion
gugacuucugucuacgcuacag

SEQ ID NO: 9224 - RNA, 22 nt, Artificial Sequence
  SAMD9L targeting guide sequence portion
guucaucuguagcguagacaga

SEQ ID NO: 9225 - RNA, 22 nt, Artificial Sequence
  SAMD9L targeting guide sequence portion
uacgcuacagaugaacugaauu

SEQ ID NO: 9226 - RNA, 22 nt, Artificial Sequence
  SAMD9L targeting guide sequence portion
uagcguagacagaagucacuug

SEQ ID NO: 9227 - RNA, 22 nt, Artificial Sequence
  SAMD9L targeting guide sequence portion
ucaauucaguucaucuguagcg

SEQ ID NO: 9228 - RNA, 22 nt, Artificial Sequence
  SAMD9L targeting guide sequence portion
ucaguucaucuguagcguagac

SEQ ID NO: 9229 - RNA, 22 nt, Artificial Sequence
  SAMD9L targeting guide sequence portion
ucaucuguagcguagacagaag

SEQ ID NO: 9230 - RNA, 22 nt, Artificial Sequence
  SAMD9L targeting guide sequence portion
ucuacgcuacagaugaacugaa

SEQ ID NO: 9231 - RNA, 22 nt, Artificial Sequence
  SAMD9L targeting guide sequence portion
ucuguagcguagacagaaguca

SEQ ID NO: 9232 - RNA, 22 nt, Artificial Sequence
  SAMD9L targeting guide sequence portion
ucugucuacgcuacagaugaac

SEQ ID NO: 9233 - RNA, 22 nt, Artificial Sequence
  SAMD9L targeting guide sequence portion
ugacuucugucuacgcuacaga

SEQ ID NO: 9234 - RNA, 22 nt, Artificial Sequence
  SAMD9L targeting guide sequence portion
uguagcguagacagaagucacu

SEQ ID NO: 9235 - RNA, 22 nt, Artificial Sequence
  SAMD9L targeting guide sequence portion
ugucuacgcuacagaugaacug

SEQ ID NO: 9236 - RNA, 22 nt, Artificial Sequence
  SAMD9L targeting guide sequence portion
uucaguucaucuguagcguaga

SEQ ID NO: 9237 - RNA, 22 nt, Artificial Sequence
  SAMD9L targeting guide sequence portion
uucaucuguagcguagacagaa

SEQ ID NO: 9238 - RNA, 22 nt, Artificial Sequence
  SAMD9L targeting guide sequence portion
uucugucuacgcuacagaugaa

SEQ ID NO: 9239 - RNA, 20 nt, Artificial Sequence
  SAMD9L targeting guide sequence portion
aaaaaaggaaauaagucaca

SEQ ID NO: 9240 - RNA, 20 nt, Artificial Sequence
  SAMD9L targeting guide sequence portion
aaaaaggaaauaagucacac

SEQ ID NO: 9241 - RNA, 20 nt, Artificial Sequence
  SAMD9L targeting guide sequence portion
aaaaggaaauaagucacaca

SEQ ID NO: 9242 - RNA, 20 nt, Artificial Sequence
  SAMD9L targeting guide sequence portion
aaaggaaauaagucacacac

SEQ ID NO: 9243 - RNA, 20 nt, Artificial Sequence
  SAMD9L targeting guide sequence portion
aaggaaauaagucacacaca

SEQ ID NO: 9244 - RNA, 20 nt, Artificial Sequence
  SAMD9L targeting guide sequence portion
aggaaauaagucacacacac

SEQ ID NO: 9245 - RNA, 20 nt, Artificial Sequence
  SAMD9L targeting guide sequence portion
gaaauaagucacacacacac

SEQ ID NO: 9246 - RNA, 20 nt, Artificial Sequence
  SAMD9L targeting guide sequence portion
ggaaauaagucacacacaca

SEQ ID NO: 9247 - RNA, 20 nt, Artificial Sequence
  SAMD9L targeting guide sequence portion
gugugacuuauuuccuuuuu

SEQ ID NO: 9248 - RNA, 20 nt, Artificial Sequence
  SAMD9L targeting guide sequence portion
gugugugacuuauuuccuuu

SEQ ID NO: 9249 - RNA, 20 nt, Artificial Sequence
  SAMD9L targeting guide sequence portion
gugugugugacuuauuuccu

SEQ ID NO: 9250 - RNA, 20 nt, Artificial Sequence
  SAMD9L targeting guide sequence portion
gugugugugugacuuauuuc

SEQ ID NO: 9251 - RNA, 20 nt, Artificial Sequence
  SAMD9L targeting guide sequence portion
ugugacuuauuuccuuuuuu

SEQ ID NO: 9252 - RNA, 20 nt, Artificial Sequence
  SAMD9L targeting guide sequence portion
ugugugacuuauuuccuuuu

SEQ ID NO: 9253 - RNA, 20 nt, Artificial Sequence
  SAMD9L targeting guide sequence portion
ugugugugacuuauuuccuu

SEQ ID NO: 9254 - RNA, 20 nt, Artificial Sequence
  SAMD9L targeting guide sequence portion
ugugugugugacuuauuucc

SEQ ID NO: 9255 - RNA, 21 nt, Artificial Sequence
  SAMD9L targeting guide sequence portion
aaaaaaggaaauaagucacac

SEQ ID NO: 9256 - RNA, 21 nt, Artificial Sequence
  SAMD9L targeting guide sequence portion
aaaaaggaaauaagucacaca

SEQ ID NO: 9257 - RNA, 21 nt, Artificial Sequence
  SAMD9L targeting guide sequence portion
aaaaggaaauaagucacacac

SEQ ID NO: 9258 - RNA, 21 nt, Artificial Sequence
  SAMD9L targeting guide sequence portion
aaaggaaauaagucacacaca

SEQ ID NO: 9259 - RNA, 21 nt, Artificial Sequence
  SAMD9L targeting guide sequence portion
aaggaaauaagucacacacac

SEQ ID NO: 9260 - RNA, 21 nt, Artificial Sequence
  SAMD9L targeting guide sequence portion
aggaaauaagucacacacaca

SEQ ID NO: 9261 - RNA, 21 nt, Artificial Sequence
  SAMD9L targeting guide sequence portion
ggaaauaagucacacacacac

SEQ ID NO: 9262 - RNA, 21 nt, Artificial Sequence
  SAMD9L targeting guide sequence portion
gugugacuuauuuccuuuuuu

SEQ ID NO: 9263 - RNA, 21 nt, Artificial Sequence
  SAMD9L targeting guide sequence portion
gugugugacuuauuuccuuuu

SEQ ID NO: 9264 - RNA, 21 nt, Artificial Sequence
  SAMD9L targeting guide sequence portion
gugugugugacuuauuuccuu

SEQ ID NO: 9265 - RNA, 21 nt, Artificial Sequence
  SAMD9L targeting guide sequence portion
gugugugugugacuuauuucc

SEQ ID NO: 9266 - RNA, 21 nt, Artificial Sequence
  SAMD9L targeting guide sequence portion
ugugugacuuauuuccuuuuu

SEQ ID NO: 9267 - RNA, 21 nt, Artificial Sequence
  SAMD9L targeting guide sequence portion
ugugugugacuuauuuccuuu

SEQ ID NO: 9268 - RNA, 21 nt, Artificial Sequence
  SAMD9L targeting guide sequence portion
ugugugugugacuuauuuccu

SEQ ID NO: 9269 - RNA, 22 nt, Artificial Sequence
  SAMD9L targeting guide sequence portion
aaaaaaggaaauaagucacaca

SEQ ID NO: 9270 - RNA, 22 nt, Artificial Sequence
  SAMD9L targeting guide sequence portion
aaaaaggaaauaagucacacac

SEQ ID NO: 9271 - RNA, 22 nt, Artificial Sequence
  SAMD9L targeting guide sequence portion
aaaaggaaauaagucacacaca

SEQ ID NO: 9272 - RNA, 22 nt, Artificial Sequence
  SAMD9L targeting guide sequence portion
aaaggaaauaagucacacacac

SEQ ID NO: 9273 - RNA, 22 nt, Artificial Sequence
  SAMD9L targeting guide sequence portion
aaggaaauaagucacacacaca

SEQ ID NO: 9274 - RNA, 22 nt, Artificial Sequence
  SAMD9L targeting guide sequence portion
aggaaauaagucacacacacac

SEQ ID NO: 9275 - RNA, 22 nt, Artificial Sequence
  SAMD9L targeting guide sequence portion
gugugugacuuauuuccuuuuu

SEQ ID NO: 9276 - RNA, 22 nt, Artificial Sequence
  SAMD9L targeting guide sequence portion
gugugugugacuuauuuccuuu

SEQ ID NO: 9277 - RNA, 22 nt, Artificial Sequence
  SAMD9L targeting guide sequence portion
gugugugugugacuuauuuccu

SEQ ID NO: 9278 - RNA, 22 nt, Artificial Sequence
  SAMD9L targeting guide sequence portion
ugugugacuuauuuccuuuuuu

SEQ ID NO: 9279 - RNA, 22 nt, Artificial Sequence
  SAMD9L targeting guide sequence portion
ugugugugacuuauuuccuuuu

SEQ ID NO: 9280 - RNA, 22 nt, Artificial Sequence
  SAMD9L targeting guide sequence portion
ugugugugugacuuauuuccuu

SEQ ID NO: 9281 - RNA, 20 nt, Artificial Sequence
  SAMD9L targeting guide sequence portion
aaaaaggcuuguaauucauu

SEQ ID NO: 9282 - RNA, 20 nt, Artificial Sequence
  SAMD9L targeting guide sequence portion
aaaacauuaaaagauugacu

SEQ ID NO: 9283 - RNA, 20 nt, Artificial Sequence
  SAMD9L targeting guide sequence portion
aaaacuuauaaaagcaauug

SEQ ID NO: 9284 - RNA, 20 nt, Artificial Sequence
  SAMD9L targeting guide sequence portion
aaaagagaaagcuuauugga

SEQ ID NO: 9285 - RNA, 20 nt, Artificial Sequence
  SAMD9L targeting guide sequence portion
aaaagauugacuccacuuug

SEQ ID NO: 9286 - RNA, 20 nt, Artificial Sequence
  SAMD9L targeting guide sequence portion
aaaagcaaaaucuguaauua

SEQ ID NO: 9287 - RNA, 20 nt, Artificial Sequence
  SAMD9L targeting guide sequence portion
aaaagcaauugaguuuaaca

SEQ ID NO: 9288 - RNA, 20 nt, Artificial Sequence
  SAMD9L targeting guide sequence portion
aaaaggcuuguaauucauuc

SEQ ID NO: 9289 - RNA, 20 nt, Artificial Sequence
  SAMD9L targeting guide sequence portion
aaaaucauaaagauauaaau

SEQ ID NO: 9290 - RNA, 20 nt, Artificial Sequence
  SAMD9L targeting guide sequence portion
aaaaucuguaauuagagguu

SEQ ID NO: 9291 - RNA, 20 nt, Artificial Sequence
  SAMD9L targeting guide sequence portion
aaaaucuguguuaaacucaa

SEQ ID NO: 9292 - RNA, 20 nt, Artificial Sequence
  SAMD9L targeting guide sequence portion
aaaaugcauauuuaaaacau

SEQ ID NO: 9293 - RNA, 20 nt, Artificial Sequence
  SAMD9L targeting guide sequence portion
aaacauuaaaagauugacuc

SEQ ID NO: 9294 - RNA, 20 nt, Artificial Sequence
  SAMD9L targeting guide sequence portion
aaacccacagauccacacca

SEQ ID NO: 9295 - RNA, 20 nt, Artificial Sequence
  SAMD9L targeting guide sequence portion
aaacucaauugcuuuuauaa

SEQ ID NO: 9296 - RNA, 20 nt, Artificial Sequence
  SAMD9L targeting guide sequence portion
aaacuuauaaaagcaauuga

SEQ ID NO: 9297 - RNA, 20 nt, Artificial Sequence
  SAMD9L targeting guide sequence portion
aaacuucuuaauuauuugag

SEQ ID NO: 9298 - RNA, 20 nt, Artificial Sequence
  SAMD9L targeting guide sequence portion
aaagagaaagcuuauuggac

SEQ ID NO: 9299 - RNA, 20 nt, Artificial Sequence
  SAMD9L targeting guide sequence portion
aaagauauaaauaaacguau

SEQ ID NO: 9300 - RNA, 20 nt, Artificial Sequence
  SAMD9L targeting guide sequence portion
aaagauugacuccacuuugu

SEQ ID NO: 9301 - RNA, 20 nt, Artificial Sequence
  SAMD9L targeting guide sequence portion
aaagauuuaaauaagaugaa

SEQ ID NO: 9302 - RNA, 20 nt, Artificial Sequence
  SAMD9L targeting guide sequence portion
aaagcaaaaucuguaauuag

SEQ ID NO: 9303 - RNA, 20 nt, Artificial Sequence
  SAMD9L targeting guide sequence portion
aaagcaauugaguuuaacac

SEQ ID NO: 9304 - RNA, 20 nt, Artificial Sequence
  SAMD9L targeting guide sequence portion
aaagcuuauuggacucaaac

SEQ ID NO: 9305 - RNA, 20 nt, Artificial Sequence
  SAMD9L targeting guide sequence portion
aaaggcuuguaauucauuca

SEQ ID NO: 9306 - RNA, 20 nt, Artificial Sequence
  SAMD9L targeting guide sequence portion
aaagugccaugagaauagag

SEQ ID NO: 9307 - RNA, 20 nt, Artificial Sequence
  SAMD9L targeting guide sequence portion
aaaguggagucaaucuuuua

SEQ ID NO: 9308 - RNA, 20 nt, Artificial Sequence
  SAMD9L targeting guide sequence portion
aaauaagaugaauguaaaag

SEQ ID NO: 9309 - RNA, 20 nt, Artificial Sequence
  SAMD9L targeting guide sequence portion
aaauaauuaagaaguuucau

SEQ ID NO: 9310 - RNA, 20 nt, Artificial Sequence
  SAMD9L targeting guide sequence portion
aaauaauuuagaaaacuuau

SEQ ID NO: 9311 - RNA, 20 nt, Artificial Sequence
  SAMD9L targeting guide sequence portion
aaauacguuuauuuauaucu

SEQ ID NO: 9312 - RNA, 20 nt, Artificial Sequence
  SAMD9L targeting guide sequence portion
aaauagaacucuggugugga

SEQ ID NO: 9313 - RNA, 20 nt, Artificial Sequence
  SAMD9L targeting guide sequence portion
aaauauauuguuccccaucc

SEQ ID NO: 9314 - RNA, 20 nt, Artificial Sequence
  SAMD9L targeting guide sequence portion
aaauaugcauuuucagacuc

SEQ ID NO: 9315 - RNA, 20 nt, Artificial Sequence
  SAMD9L targeting guide sequence portion
aaauaugccuacccgcagag

SEQ ID NO: 9316 - RNA, 20 nt, Artificial Sequence
  SAMD9L targeting guide sequence portion
aaaucauaaagauauaaaua

SEQ ID NO: 9317 - RNA, 20 nt, Artificial Sequence
  SAMD9L targeting guide sequence portion
aaaucuguaauuagagguua

SEQ ID NO: 9318 - RNA, 20 nt, Artificial Sequence
  SAMD9L targeting guide sequence portion
aaaucuguguuaaacucaau

SEQ ID NO: 9319 - RNA, 20 nt, Artificial Sequence
  SAMD9L targeting guide sequence portion
aaaucuuugcugucacagug

SEQ ID NO: 9320 - RNA, 20 nt, Artificial Sequence
  SAMD9L targeting guide sequence portion
aaaugcauauuuaaaacauu

SEQ ID NO: 9321 - RNA, 20 nt, Artificial Sequence
  SAMD9L targeting guide sequence portion
aaauuauuucuucacuguga

SEQ ID NO: 9322 - RNA, 20 nt, Artificial Sequence
  SAMD9L targeting guide sequence portion
aacacagauuuuauugcccu

SEQ ID NO: 9323 - RNA, 20 nt, Artificial Sequence
  SAMD9L targeting guide sequence portion
aacauuaaaagauugacucc

SEQ ID NO: 9324 - RNA, 20 nt, Artificial Sequence
  SAMD9L targeting guide sequence portion
aacauuauggcuaaccucua

SEQ ID NO: 9325 - RNA, 20 nt, Artificial Sequence
  SAMD9L targeting guide sequence portion
aacccacagauccacaccag

SEQ ID NO: 9326 - RNA, 20 nt, Artificial Sequence
  SAMD9L targeting guide sequence portion
aaccucuaauuacagauuuu

SEQ ID NO: 9327 - RNA, 20 nt, Artificial Sequence
  SAMD9L targeting guide sequence portion
aacucaauugcuuuuauaag

SEQ ID NO: 9328 - RNA, 20 nt, Artificial Sequence
  SAMD9L targeting guide sequence portion
aacucugguguggaucugug

SEQ ID NO: 9329 - RNA, 20 nt, Artificial Sequence
  SAMD9L targeting guide sequence portion
aacugucuauagggcaauaa

SEQ ID NO: 9330 - RNA, 20 nt, Artificial Sequence
  SAMD9L targeting guide sequence portion
aacuuauaaaagcaauugag

SEQ ID NO: 9331 - RNA, 20 nt, Artificial Sequence
  SAMD9L targeting guide sequence portion
aacuucuuaauuauuugagu

SEQ ID NO: 9332 - RNA, 20 nt, Artificial Sequence
  SAMD9L targeting guide sequence portion
aagaaauaauuuagaaaacu

SEQ ID NO: 9333 - RNA, 20 nt, Artificial Sequence
  SAMD9L targeting guide sequence portion
aagaaguuucauugauaucc

SEQ ID NO: 9334 - RNA, 20 nt, Artificial Sequence
  SAMD9L targeting guide sequence portion
aagagaaagcuuauuggacu

SEQ ID NO: 9335 - RNA, 20 nt, Artificial Sequence
  SAMD9L targeting guide sequence portion
aagauauaaauaaacguauu

SEQ ID NO: 9336 - RNA, 20 nt, Artificial Sequence
  SAMD9L targeting guide sequence portion
aagauaugaaauaugccuac

SEQ ID NO: 9337 - RNA, 20 nt, Artificial Sequence
  SAMD9L targeting guide sequence portion
aagaugaauguaaaagagaa

SEQ ID NO: 9338 - RNA, 20 nt, Artificial Sequence
  SAMD9L targeting guide sequence portion
aagaugagguaaauagaacu

SEQ ID NO: 9339 - RNA, 20 nt, Artificial Sequence
  SAMD9L targeting guide sequence portion
aagauugacuccacuuugug

SEQ ID NO: 9340 - RNA, 20 nt, Artificial Sequence
  SAMD9L targeting guide sequence portion
aagauuuaaauaagaugaau

SEQ ID NO: 9341 - RNA, 20 nt, Artificial Sequence
  SAMD9L targeting guide sequence portion
aagcaaaaucuguaauuaga

SEQ ID NO: 9342 - RNA, 20 nt, Artificial Sequence
  SAMD9L targeting guide sequence portion
aagcaauugaguuuaacaca

SEQ ID NO: 9343 - RNA, 20 nt, Artificial Sequence
  SAMD9L targeting guide sequence portion
aagccuuuuuaagauaugaa

SEQ ID NO: 9344 - RNA, 20 nt, Artificial Sequence
  SAMD9L targeting guide sequence portion
aagcucugcggguaggcaua

SEQ ID NO: 9345 - RNA, 20 nt, Artificial Sequence
  SAMD9L targeting guide sequence portion
aagcuuauuggacucaaacc

SEQ ID NO: 9346 - RNA, 20 nt, Artificial Sequence
  SAMD9L targeting guide sequence portion
aagcuuucucuuuuacauuc

SEQ ID NO: 9347 - RNA, 20 nt, Artificial Sequence
  SAMD9L targeting guide sequence portion
aaggcuuguaauucauucag

SEQ ID NO: 9348 - RNA, 20 nt, Artificial Sequence
  SAMD9L targeting guide sequence portion
aagguaaauauauuguuccc

SEQ ID NO: 9349 - RNA, 20 nt, Artificial Sequence
  SAMD9L targeting guide sequence portion
aagugccaugagaauagaga

SEQ ID NO: 9350 - RNA, 20 nt, Artificial Sequence
  SAMD9L targeting guide sequence portion
aaguggagucaaucuuuuaa

SEQ ID NO: 9351 - RNA, 20 nt, Artificial Sequence
  SAMD9L targeting guide sequence portion
aaguuucauugauauccacu

SEQ ID NO: 9352 - RNA, 20 nt, Artificial Sequence
  SAMD9L targeting guide sequence portion
aaguuuucuaaauuauuucu

SEQ ID NO: 9353 - RNA, 20 nt, Artificial Sequence
  SAMD9L targeting guide sequence portion
aauaaaaucauaaagauaua

SEQ ID NO: 9354 - RNA, 20 nt, Artificial Sequence
  SAMD9L targeting guide sequence portion
aauaaaaucuguguuaaacu

SEQ ID NO: 9355 - RNA, 20 nt, Artificial Sequence
  SAMD9L targeting guide sequence portion
aauaagaugaauguaaaaga

SEQ ID NO: 9356 - RNA, 20 nt, Artificial Sequence
  SAMD9L targeting guide sequence portion
aauaagcuuucucuuuuaca

SEQ ID NO: 9357 - RNA, 20 nt, Artificial Sequence
  SAMD9L targeting guide sequence portion
aauaauuaagaaguuucauu

SEQ ID NO: 9358 - RNA, 20 nt, Artificial Sequence
  SAMD9L targeting guide sequence portion
aauaauuuagaaaacuuaua

SEQ ID NO: 9359 - RNA, 20 nt, Artificial Sequence
  SAMD9L targeting guide sequence portion
aauacguuuauuuauaucuu

SEQ ID NO: 9360 - RNA, 20 nt, Artificial Sequence
  SAMD9L targeting guide sequence portion
aauagaacucugguguggau

SEQ ID NO: 9361 - RNA, 20 nt, Artificial Sequence
  SAMD9L targeting guide sequence portion
aauagagagagagaauaaaa

SEQ ID NO: 9362 - RNA, 20 nt, Artificial Sequence
  SAMD9L targeting guide sequence portion
aauauauuguuccccaucca

SEQ ID NO: 9363 - RNA, 20 nt, Artificial Sequence
  SAMD9L targeting guide sequence portion
aauaugcauuuucagacuca

SEQ ID NO: 9364 - RNA, 20 nt, Artificial Sequence
  SAMD9L targeting guide sequence portion
aauaugccuacccgcagagc

SEQ ID NO: 9365 - RNA, 20 nt, Artificial Sequence
  SAMD9L targeting guide sequence portion
aaucauaaagauauaaauaa

SEQ ID NO: 9366 - RNA, 20 nt, Artificial Sequence
  SAMD9L targeting guide sequence portion
aaucuguaauuagagguuag

SEQ ID NO: 9367 - RNA, 20 nt, Artificial Sequence
  SAMD9L targeting guide sequence portion
aaucuguguuaaacucaauu

SEQ ID NO: 9368 - RNA, 20 nt, Artificial Sequence
  SAMD9L targeting guide sequence portion
aaucuuugcugucacaguga

SEQ ID NO: 9369 - RNA, 20 nt, Artificial Sequence
  SAMD9L targeting guide sequence portion
aaucuuuuaauguuuuaaau

SEQ ID NO: 9370 - RNA, 20 nt, Artificial Sequence
  SAMD9L targeting guide sequence portion
aaugaaacuucuuaauuauu

SEQ ID NO: 9371 - RNA, 20 nt, Artificial Sequence
  SAMD9L targeting guide sequence portion
aaugaauuacaagccuuuuu

SEQ ID NO: 9372 - RNA, 20 nt, Artificial Sequence
  SAMD9L targeting guide sequence portion
aaugcauauuuaaaacauua

SEQ ID NO: 9373 - RNA, 20 nt, Artificial Sequence
  SAMD9L targeting guide sequence portion
aauguaaaagagaaagcuua

SEQ ID NO: 9374 - RNA, 20 nt, Artificial Sequence
  SAMD9L targeting guide sequence portion
aauguuaugaaagugccaug

SEQ ID NO: 9375 - RNA, 20 nt, Artificial Sequence
  SAMD9L targeting guide sequence portion
aauguuuuaaauaugcauuu

SEQ ID NO: 9376 - RNA, 20 nt, Artificial Sequence
  SAMD9L targeting guide sequence portion
aauuaagaaguuucauugau

SEQ ID NO: 9377 - RNA, 20 nt, Artificial Sequence
  SAMD9L targeting guide sequence portion
aauuacaagccuuuuuaaga

SEQ ID NO: 9378 - RNA, 20 nt, Artificial Sequence
  SAMD9L targeting guide sequence portion
aauuacagauuuugcuuuug

SEQ ID NO: 9379 - RNA, 20 nt, Artificial Sequence
  SAMD9L targeting guide sequence portion
aauuagagguuagccauaau

SEQ ID NO: 9380 - RNA, 20 nt, Artificial Sequence
  SAMD9L targeting guide sequence portion
aauuauuucuucacugugac

SEQ ID NO: 9381 - RNA, 20 nt, Artificial Sequence
  SAMD9L targeting guide sequence portion
aauuauuugagucugaaaau

SEQ ID NO: 9382 - RNA, 20 nt, Artificial Sequence
  SAMD9L targeting guide sequence portion
aauucauucagggaggcaaa

SEQ ID NO: 9383 - RNA, 20 nt, Artificial Sequence
  SAMD9L targeting guide sequence portion
aauugaguuuaacacagauu

SEQ ID NO: 9384 - RNA, 20 nt, Artificial Sequence
  SAMD9L targeting guide sequence portion
aauugcuuuuauaaguuuuc

SEQ ID NO: 9385 - RNA, 20 nt, Artificial Sequence
  SAMD9L targeting guide sequence portion
aauuuagaaaacuuauaaaa

SEQ ID NO: 9386 - RNA, 20 nt, Artificial Sequence
  SAMD9L targeting guide sequence portion
acaaaguggagucaaucuuu

SEQ ID NO: 9387 - RNA, 20 nt, Artificial Sequence
  SAMD9L targeting guide sequence portion
acaagccuuuuuaagauaug

SEQ ID NO: 9388 - RNA, 20 nt, Artificial Sequence
  SAMD9L targeting guide sequence portion
acaauacaucaccuguaguu

SEQ ID NO: 9389 - RNA, 20 nt, Artificial Sequence
  SAMD9L targeting guide sequence portion
acacagauuuuauugcccua

SEQ ID NO: 9390 - RNA, 20 nt, Artificial Sequence
  SAMD9L targeting guide sequence portion
acaccagaguucuauuuacc

SEQ ID NO: 9391 - RNA, 20 nt, Artificial Sequence
  SAMD9L targeting guide sequence portion
acagauccacaccagaguuc

SEQ ID NO: 9392 - RNA, 20 nt, Artificial Sequence
  SAMD9L targeting guide sequence portion
acagauuuuauugcccuaua

SEQ ID NO: 9393 - RNA, 20 nt, Artificial Sequence
  SAMD9L targeting guide sequence portion
acagauuuugcuuuugccuc

SEQ ID NO: 9394 - RNA, 20 nt, Artificial Sequence
  SAMD9L targeting guide sequence portion
acagcaaagauuuaaauaag

SEQ ID NO: 9395 - RNA, 20 nt, Artificial Sequence
  SAMD9L targeting guide sequence portion
acagugaagaaauaauuuag

SEQ ID NO: 9396 - RNA, 20 nt, Artificial Sequence
  SAMD9L targeting guide sequence portion
acaguuaugaugugaccagu

SEQ ID NO: 9397 - RNA, 20 nt, Artificial Sequence
  SAMD9L targeting guide sequence portion
acaucauaacugucuauagg

SEQ ID NO: 9398 - RNA, 20 nt, Artificial Sequence
  SAMD9L targeting guide sequence portion
acauuaaaagauugacucca

SEQ ID NO: 9399 - RNA, 20 nt, Artificial Sequence
  SAMD9L targeting guide sequence portion
acauuauggcuaaccucuaa

SEQ ID NO: 9400 - RNA, 20 nt, Artificial Sequence
  SAMD9L targeting guide sequence portion
acauucaucuuauuuaaauc

SEQ ID NO: 9401 - RNA, 20 nt, Artificial Sequence
  SAMD9L targeting guide sequence portion
accaagaugagguaaauaga

SEQ ID NO: 9402 - RNA, 20 nt, Artificial Sequence
  SAMD9L targeting guide sequence portion
accagaguucuauuuaccuc

SEQ ID NO: 9403 - RNA, 20 nt, Artificial Sequence
  SAMD9L targeting guide sequence portion
accaguggauaucaaugaaa

SEQ ID NO: 9404 - RNA, 20 nt, Artificial Sequence
  SAMD9L targeting guide sequence portion
acccacagauccacaccaga

SEQ ID NO: 9405 - RNA, 20 nt, Artificial Sequence
  SAMD9L targeting guide sequence portion
acccgcagagcuuggcacaa

SEQ ID NO: 9406 - RNA, 20 nt, Artificial Sequence
  SAMD9L targeting guide sequence portion
accucaucuugguaucaaua

SEQ ID NO: 9407 - RNA, 20 nt, Artificial Sequence
  SAMD9L targeting guide sequence portion
accucuaauuacagauuuug

SEQ ID NO: 9408 - RNA, 20 nt, Artificial Sequence
  SAMD9L targeting guide sequence portion
acguuuauuuauaucuuuau

SEQ ID NO: 9409 - RNA, 20 nt, Artificial Sequence
  SAMD9L targeting guide sequence portion
acucaaacccacagauccac

SEQ ID NO: 9410 - RNA, 20 nt, Artificial Sequence
  SAMD9L targeting guide sequence portion
acucaaauaauuaagaaguu

SEQ ID NO: 9411 - RNA, 20 nt, Artificial Sequence
  SAMD9L targeting guide sequence portion
acucaauugcuuuuauaagu

SEQ ID NO: 9412 - RNA, 20 nt, Artificial Sequence
  SAMD9L targeting guide sequence portion
acuccacuuugugccaagcu

SEQ ID NO: 9413 - RNA, 20 nt, Artificial Sequence
  SAMD9L targeting guide sequence portion
acucugguguggaucugugg

SEQ ID NO: 9414 - RNA, 20 nt, Artificial Sequence
  SAMD9L targeting guide sequence portion
acuggucacaucauaacugu

SEQ ID NO: 9415 - RNA, 20 nt, Artificial Sequence
  SAMD9L targeting guide sequence portion
acugucuauagggcaauaaa

SEQ ID NO: 9416 - RNA, 20 nt, Artificial Sequence
  SAMD9L targeting guide sequence portion
acugugacagcaaagauuua

SEQ ID NO: 9417 - RNA, 20 nt, Artificial Sequence
  SAMD9L targeting guide sequence portion
acuuauaaaagcaauugagu

SEQ ID NO: 9418 - RNA, 20 nt, Artificial Sequence
  SAMD9L targeting guide sequence portion
acuucuuaauuauuugaguc

SEQ ID NO: 9419 - RNA, 20 nt, Artificial Sequence
  SAMD9L targeting guide sequence portion
acuuucauaacauuauggcu

SEQ ID NO: 9420 - RNA, 20 nt, Artificial Sequence
  SAMD9L targeting guide sequence portion
acuuugugccaagcucugcg

SEQ ID NO: 9421 - RNA, 20 nt, Artificial Sequence
  SAMD9L targeting guide sequence portion
agaaaacuuauaaaagcaau

SEQ ID NO: 9422 - RNA, 20 nt, Artificial Sequence
  SAMD9L targeting guide sequence portion
agaaagcuuauuggacucaa

SEQ ID NO: 9423 - RNA, 20 nt, Artificial Sequence
  SAMD9L targeting guide sequence portion
agaaauaauuuagaaaacuu

SEQ ID NO: 9424 - RNA, 20 nt, Artificial Sequence
  SAMD9L targeting guide sequence portion
agaacucugguguggaucug

SEQ ID NO: 9425 - RNA, 20 nt, Artificial Sequence
  SAMD9L targeting guide sequence portion
agaaguuucauugauaucca

SEQ ID NO: 9426 - RNA, 20 nt, Artificial Sequence
  SAMD9L targeting guide sequence portion
agaauaaaaucauaaagaua

SEQ ID NO: 9427 - RNA, 20 nt, Artificial Sequence
  SAMD9L targeting guide sequence portion
agaauagagagagagaauaa

SEQ ID NO: 9428 - RNA, 20 nt, Artificial Sequence
  SAMD9L targeting guide sequence portion
agacaguuaugaugugacca

SEQ ID NO: 9429 - RNA, 20 nt, Artificial Sequence
  SAMD9L targeting guide sequence portion
agacucaaauaauuaagaag

SEQ ID NO: 9430 - RNA, 20 nt, Artificial Sequence
  SAMD9L targeting guide sequence portion
agagaaagcuuauuggacuc

SEQ ID NO: 9431 - RNA, 20 nt, Artificial Sequence
  SAMD9L targeting guide sequence portion
agagaauaaaaucauaaaga

SEQ ID NO: 9432 - RNA, 20 nt, Artificial Sequence
  SAMD9L targeting guide sequence portion
agagagaauaaaaucauaaa

SEQ ID NO: 9433 - RNA, 20 nt, Artificial Sequence
  SAMD9L targeting guide sequence portion
agagagagaauaaaaucaua

SEQ ID NO: 9434 - RNA, 20 nt, Artificial Sequence
  SAMD9L targeting guide sequence portion
agagagagagaauaaaauca

SEQ ID NO: 9435 - RNA, 20 nt, Artificial Sequence
  SAMD9L targeting guide sequence portion
agagcuuggcacaaagugga

SEQ ID NO: 9436 - RNA, 20 nt, Artificial Sequence
  SAMD9L targeting guide sequence portion
agagguuagccauaauguua

SEQ ID NO: 9437 - RNA, 20 nt, Artificial Sequence
  SAMD9L targeting guide sequence portion
agaguucuauuuaccucauc

SEQ ID NO: 9438 - RNA, 20 nt, Artificial Sequence
  SAMD9L targeting guide sequence portion
agauauaaauaaacguauuu

SEQ ID NO: 9439 - RNA, 20 nt, Artificial Sequence
  SAMD9L targeting guide sequence portion
agauaugaaauaugccuacc

SEQ ID NO: 9440 - RNA, 20 nt, Artificial Sequence
  SAMD9L targeting guide sequence portion
agauccacaccagaguucua

SEQ ID NO: 9441 - RNA, 20 nt, Artificial Sequence
  SAMD9L targeting guide sequence portion
agaugaauguaaaagagaaa

SEQ ID NO: 9442 - RNA, 20 nt, Artificial Sequence
  SAMD9L targeting guide sequence portion
agaugagguaaauagaacuc

SEQ ID NO: 9443 - RNA, 20 nt, Artificial Sequence
  SAMD9L targeting guide sequence portion
agauugacuccacuuugugc

SEQ ID NO: 9444 - RNA, 20 nt, Artificial Sequence
  SAMD9L targeting guide sequence portion
agauuuaaauaagaugaaug

SEQ ID NO: 9445 - RNA, 20 nt, Artificial Sequence
  SAMD9L targeting guide sequence portion
agauuuuauugcccuauaga

SEQ ID NO: 9446 - RNA, 20 nt, Artificial Sequence
  SAMD9L targeting guide sequence portion
agauuuugcuuuugccuccc

SEQ ID NO: 9447 - RNA, 20 nt, Artificial Sequence
  SAMD9L targeting guide sequence portion
agcaaaaucuguaauuagag

SEQ ID NO: 9448 - RNA, 20 nt, Artificial Sequence
  SAMD9L targeting guide sequence portion
agcaaagauuuaaauaagau

SEQ ID NO: 9449 - RNA, 20 nt, Artificial Sequence
  SAMD9L targeting guide sequence portion
agcaauugaguuuaacacag

SEQ ID NO: 9450 - RNA, 20 nt, Artificial Sequence
  SAMD9L targeting guide sequence portion
agccauaauguuaugaaagu

SEQ ID NO: 9451 - RNA, 20 nt, Artificial Sequence
  SAMD9L targeting guide sequence portion
agccuuuuuaagauaugaaa

SEQ ID NO: 9452 - RNA, 20 nt, Artificial Sequence
  SAMD9L targeting guide sequence portion
agcucugcggguaggcauau

SEQ ID NO: 9453 - RNA, 20 nt, Artificial Sequence
  SAMD9L targeting guide sequence portion
agcuuauuggacucaaaccc

SEQ ID NO: 9454 - RNA, 20 nt, Artificial Sequence
  SAMD9L targeting guide sequence portion
agcuuggcacaaaguggagu

SEQ ID NO: 9455 - RNA, 20 nt, Artificial Sequence
  SAMD9L targeting guide sequence portion
agcuuucucuuuuacauuca

SEQ ID NO: 9456 - RNA, 20 nt, Artificial Sequence
  SAMD9L targeting guide sequence portion
aggcaaaagcaaaaucugua

SEQ ID NO: 9457 - RNA, 20 nt, Artificial Sequence
  SAMD9L targeting guide sequence portion
aggcauauuucauaucuuaa

SEQ ID NO: 9458 - RNA, 20 nt, Artificial Sequence
  SAMD9L targeting guide sequence portion
aggcuuguaauucauucagg

SEQ ID NO: 9459 - RNA, 20 nt, Artificial Sequence
  SAMD9L targeting guide sequence portion
agggaggcaaaagcaaaauc

SEQ ID NO: 9460 - RNA, 20 nt, Artificial Sequence
  SAMD9L targeting guide sequence portion
agggcaauaaaaucuguguu

SEQ ID NO: 9461 - RNA, 20 nt, Artificial Sequence
  SAMD9L targeting guide sequence portion
agguaaauagaacucuggug

SEQ ID NO: 9462 - RNA, 20 nt, Artificial Sequence
  SAMD9L targeting guide sequence portion
agguaaauauauuguucccc

SEQ ID NO: 9463 - RNA, 20 nt, Artificial Sequence
  SAMD9L targeting guide sequence portion
agguuagccauaauguuaug

SEQ ID NO: 9464 - RNA, 20 nt, Artificial Sequence
  SAMD9L targeting guide sequence portion
agucaaucuuuuaauguuuu

SEQ ID NO: 9465 - RNA, 20 nt, Artificial Sequence
  SAMD9L targeting guide sequence portion
aguccaauaagcuuucucuu

SEQ ID NO: 9466 - RNA, 20 nt, Artificial Sequence
  SAMD9L targeting guide sequence portion
agucugaaaaugcauauuua

SEQ ID NO: 9467 - RNA, 20 nt, Artificial Sequence
  SAMD9L targeting guide sequence portion
agugaagaaauaauuuagaa

SEQ ID NO: 9468 - RNA, 20 nt, Artificial Sequence
  SAMD9L targeting guide sequence portion
agugccaugagaauagagag

SEQ ID NO: 9469 - RNA, 20 nt, Artificial Sequence
  SAMD9L targeting guide sequence portion
aguggagucaaucuuuuaau

SEQ ID NO: 9470 - RNA, 20 nt, Artificial Sequence
  SAMD9L targeting guide sequence portion
aguggauaucaaugaaacuu

SEQ ID NO: 9471 - RNA, 20 nt, Artificial Sequence
  SAMD9L targeting guide sequence portion
aguuaugaugugaccagugg

SEQ ID NO: 9472 - RNA, 20 nt, Artificial Sequence
  SAMD9L targeting guide sequence portion
aguucuauuuaccucaucuu

SEQ ID NO: 9473 - RNA, 20 nt, Artificial Sequence
  SAMD9L targeting guide sequence portion
aguuuaacacagauuuuauu

SEQ ID NO: 9474 - RNA, 20 nt, Artificial Sequence
  SAMD9L targeting guide sequence portion
aguuucauugauauccacug

SEQ ID NO: 9475 - RNA, 20 nt, Artificial Sequence
  SAMD9L targeting guide sequence portion
aguuuucuaaauuauuucuu

SEQ ID NO: 9476 - RNA, 20 nt, Artificial Sequence
  SAMD9L targeting guide sequence portion
aguuuuuauugauaccaaga

SEQ ID NO: 9477 - RNA, 20 nt, Artificial Sequence
  SAMD9L targeting guide sequence portion
auaaaagcaauugaguuuaa

SEQ ID NO: 9478 - RNA, 20 nt, Artificial Sequence
  SAMD9L targeting guide sequence portion
auaaaaucauaaagauauaa

SEQ ID NO: 9479 - RNA, 20 nt, Artificial Sequence
  SAMD9L targeting guide sequence portion
auaaaaucuguguuaaacuc

SEQ ID NO: 9480 - RNA, 20 nt, Artificial Sequence
  SAMD9L targeting guide sequence portion
auaaagauauaaauaaacgu

SEQ ID NO: 9481 - RNA, 20 nt, Artificial Sequence
  SAMD9L targeting guide sequence portion
auaacauuauggcuaaccuc

SEQ ID NO: 9482 - RNA, 20 nt, Artificial Sequence
  SAMD9L targeting guide sequence portion
auaacugucuauagggcaau

SEQ ID NO: 9483 - RNA, 20 nt, Artificial Sequence
  SAMD9L targeting guide sequence portion
auaagaugaauguaaaagag

SEQ ID NO: 9484 - RNA, 20 nt, Artificial Sequence
  SAMD9L targeting guide sequence portion
auaagcuuucucuuuuacau

SEQ ID NO: 9485 - RNA, 20 nt, Artificial Sequence
  SAMD9L targeting guide sequence portion
auaaguuuucuaaauuauuu

SEQ ID NO: 9486 - RNA, 20 nt, Artificial Sequence
  SAMD9L targeting guide sequence portion
auaauguuaugaaagugcca

SEQ ID NO: 9487 - RNA, 20 nt, Artificial Sequence
  SAMD9L targeting guide sequence portion
auaauuaagaaguuucauug

SEQ ID NO: 9488 - RNA, 20 nt, Artificial Sequence
  SAMD9L targeting guide sequence portion
auaauuuagaaaacuuauaa

SEQ ID NO: 9489 - RNA, 20 nt, Artificial Sequence
  SAMD9L targeting guide sequence portion
auaccaagaugagguaaaua

SEQ ID NO: 9490 - RNA, 20 nt, Artificial Sequence
  SAMD9L targeting guide sequence portion
auacguuuauuuauaucuuu

SEQ ID NO: 9491 - RNA, 20 nt, Artificial Sequence
  SAMD9L targeting guide sequence portion
auagaacucugguguggauc

SEQ ID NO: 9492 - RNA, 20 nt, Artificial Sequence
  SAMD9L targeting guide sequence portion
auagacaguuaugaugugac

SEQ ID NO: 9493 - RNA, 20 nt, Artificial Sequence
  SAMD9L targeting guide sequence portion
auagagagagagaauaaaau

SEQ ID NO: 9494 - RNA, 20 nt, Artificial Sequence
  SAMD9L targeting guide sequence portion
auagggcaauaaaaucugug

SEQ ID NO: 9495 - RNA, 20 nt, Artificial Sequence
  SAMD9L targeting guide sequence portion
auauaaauaaacguauuuga

SEQ ID NO: 9496 - RNA, 20 nt, Artificial Sequence
  SAMD9L targeting guide sequence portion
auauauuguuccccauccac

SEQ ID NO: 9497 - RNA, 20 nt, Artificial Sequence
  SAMD9L targeting guide sequence portion
auaucaaugaaacuucuuaa

SEQ ID NO: 9498 - RNA, 20 nt, Artificial Sequence
  SAMD9L targeting guide sequence portion
auauccacuggucacaucau

SEQ ID NO: 9499 - RNA, 20 nt, Artificial Sequence
  SAMD9L targeting guide sequence portion
auaucuuaaaaaggcuugua

SEQ ID NO: 9500 - RNA, 20 nt, Artificial Sequence
  SAMD9L targeting guide sequence portion
auaucuuuaugauuuuauuc

SEQ ID NO: 9501 - RNA, 20 nt, Artificial Sequence
  SAMD9L targeting guide sequence portion
auaugaaauaugccuacccg

SEQ ID NO: 9502 - RNA, 20 nt, Artificial Sequence
  SAMD9L targeting guide sequence portion
auaugcauuuucagacucaa

SEQ ID NO: 9503 - RNA, 20 nt, Artificial Sequence
  SAMD9L targeting guide sequence portion
auaugccuacccgcagagcu

SEQ ID NO: 9504 - RNA, 20 nt, Artificial Sequence
  SAMD9L targeting guide sequence portion
auauuuaaaacauuaaaaga

SEQ ID NO: 9505 - RNA, 20 nt, Artificial Sequence
  SAMD9L targeting guide sequence portion
auauuucauaucuuaaaaag

SEQ ID NO: 9506 - RNA, 20 nt, Artificial Sequence
  SAMD9L targeting guide sequence portion
aucaaugaaacuucuuaauu

SEQ ID NO: 9507 - RNA, 20 nt, Artificial Sequence
  SAMD9L targeting guide sequence portion
aucauaaagauauaaauaaa

SEQ ID NO: 9508 - RNA, 20 nt, Artificial Sequence
  SAMD9L targeting guide sequence portion
aucauaacugucuauagggc

SEQ ID NO: 9509 - RNA, 20 nt, Artificial Sequence
  SAMD9L targeting guide sequence portion
auccacaccagaguucuauu

SEQ ID NO: 9510 - RNA, 20 nt, Artificial Sequence
  SAMD9L targeting guide sequence portion
auccacuggucacaucauaa

SEQ ID NO: 9511 - RNA, 20 nt, Artificial Sequence
  SAMD9L targeting guide sequence portion
aucuguaauuagagguuagc

SEQ ID NO: 9512 - RNA, 20 nt, Artificial Sequence
  SAMD9L targeting guide sequence portion
aucuguggguuugaguccaa

SEQ ID NO: 9513 - RNA, 20 nt, Artificial Sequence
  SAMD9L targeting guide sequence portion
aucuguguuaaacucaauug

SEQ ID NO: 9514 - RNA, 20 nt, Artificial Sequence
  SAMD9L targeting guide sequence portion
aucuuaaaaaggcuuguaau

SEQ ID NO: 9515 - RNA, 20 nt, Artificial Sequence
  SAMD9L targeting guide sequence portion
aucuuauuuaaaucuuugcu

SEQ ID NO: 9516 - RNA, 20 nt, Artificial Sequence
  SAMD9L targeting guide sequence portion
aucuuuaugauuuuauucuc

SEQ ID NO: 9517 - RNA, 20 nt, Artificial Sequence
  SAMD9L targeting guide sequence portion
aucuuugcugucacagugaa

SEQ ID NO: 9518 - RNA, 20 nt, Artificial Sequence
  SAMD9L targeting guide sequence portion
aucuuuuaauguuuuaaaua

SEQ ID NO: 9519 - RNA, 20 nt, Artificial Sequence
  SAMD9L targeting guide sequence portion
augaaacuucuuaauuauuu

SEQ ID NO: 9520 - RNA, 20 nt, Artificial Sequence
  SAMD9L targeting guide sequence portion
augaaagugccaugagaaua

SEQ ID NO: 9521 - RNA, 20 nt, Artificial Sequence
  SAMD9L targeting guide sequence portion
augaaauaugccuacccgca

SEQ ID NO: 9522 - RNA, 20 nt, Artificial Sequence
  SAMD9L targeting guide sequence portion
augaauguaaaagagaaagc

SEQ ID NO: 9523 - RNA, 20 nt, Artificial Sequence
  SAMD9L targeting guide sequence portion
augaauuacaagccuuuuua

SEQ ID NO: 9524 - RNA, 20 nt, Artificial Sequence
  SAMD9L targeting guide sequence portion
augagaauagagagagagaa

SEQ ID NO: 9525 - RNA, 20 nt, Artificial Sequence
  SAMD9L targeting guide sequence portion
augagguaaauagaacucug

SEQ ID NO: 9526 - RNA, 20 nt, Artificial Sequence
  SAMD9L targeting guide sequence portion
augaugugaccaguggauau

SEQ ID NO: 9527 - RNA, 20 nt, Artificial Sequence
  SAMD9L targeting guide sequence portion
augauuuuauucucucucuc

SEQ ID NO: 9528 - RNA, 20 nt, Artificial Sequence
  SAMD9L targeting guide sequence portion
augcauauuuaaaacauuaa

SEQ ID NO: 9529 - RNA, 20 nt, Artificial Sequence
  SAMD9L targeting guide sequence portion
augcauuuucagacucaaau

SEQ ID NO: 9530 - RNA, 20 nt, Artificial Sequence
  SAMD9L targeting guide sequence portion
augccuacccgcagagcuug

SEQ ID NO: 9531 - RNA, 20 nt, Artificial Sequence
  SAMD9L targeting guide sequence portion
auggcacuuucauaacauua

SEQ ID NO: 9532 - RNA, 20 nt, Artificial Sequence
  SAMD9L targeting guide sequence portion
auggcuaaccucuaauuaca

SEQ ID NO: 9533 - RNA, 20 nt, Artificial Sequence
  SAMD9L targeting guide sequence portion
auggggaacaauauauuuac

SEQ ID NO: 9534 - RNA, 20 nt, Artificial Sequence
  SAMD9L targeting guide sequence portion
auguaaaagagaaagcuuau

SEQ ID NO: 9535 - RNA, 20 nt, Artificial Sequence
  SAMD9L targeting guide sequence portion
augugaccaguggauaucaa

SEQ ID NO: 9536 - RNA, 20 nt, Artificial Sequence
  SAMD9L targeting guide sequence portion
auguggaagguaaauauauu

SEQ ID NO: 9537 - RNA, 20 nt, Artificial Sequence
  SAMD9L targeting guide sequence portion
augugguggauggggaacaa

SEQ ID NO: 9538 - RNA, 20 nt, Artificial Sequence
  SAMD9L targeting guide sequence portion
auguuaugaaagugccauga

SEQ ID NO: 9539 - RNA, 20 nt, Artificial Sequence
  SAMD9L targeting guide sequence portion
auguuuuaaauaugcauuuu

SEQ ID NO: 9540 - RNA, 20 nt, Artificial Sequence
  SAMD9L targeting guide sequence portion
auuaaaagauugacuccacu

SEQ ID NO: 9541 - RNA, 20 nt, Artificial Sequence
  SAMD9L targeting guide sequence portion
auuaagaaguuucauugaua

SEQ ID NO: 9542 - RNA, 20 nt, Artificial Sequence
  SAMD9L targeting guide sequence portion
auuacaagccuuuuuaagau

SEQ ID NO: 9543 - RNA, 20 nt, Artificial Sequence
  SAMD9L targeting guide sequence portion
auuacagauuuugcuuuugc

SEQ ID NO: 9544 - RNA, 20 nt, Artificial Sequence
  SAMD9L targeting guide sequence portion
auuagagguuagccauaaug

SEQ ID NO: 9545 - RNA, 20 nt, Artificial Sequence
  SAMD9L targeting guide sequence portion
auuauggcuaaccucuaauu

SEQ ID NO: 9546 - RNA, 20 nt, Artificial Sequence
  SAMD9L targeting guide sequence portion
auuauuucuucacugugaca

SEQ ID NO: 9547 - RNA, 20 nt, Artificial Sequence
  SAMD9L targeting guide sequence portion
auuauuugagucugaaaaug

SEQ ID NO: 9548 - RNA, 20 nt, Artificial Sequence
  SAMD9L targeting guide sequence portion
auucagggaggcaaaagcaa

SEQ ID NO: 9549 - RNA, 20 nt, Artificial Sequence
  SAMD9L targeting guide sequence portion
auucaucuuauuuaaaucuu

SEQ ID NO: 9550 - RNA, 20 nt, Artificial Sequence
  SAMD9L targeting guide sequence portion
auucauucagggaggcaaaa

SEQ ID NO: 9551 - RNA, 20 nt, Artificial Sequence
  SAMD9L targeting guide sequence portion
auucucauggcacuuucaua

SEQ ID NO: 9552 - RNA, 20 nt, Artificial Sequence
  SAMD9L targeting guide sequence portion
auucucucucucuauucuca

SEQ ID NO: 9553 - RNA, 20 nt, Artificial Sequence
  SAMD9L targeting guide sequence portion
auugacuccacuuugugcca

SEQ ID NO: 9554 - RNA, 20 nt, Artificial Sequence
  SAMD9L targeting guide sequence portion
auugaguuuaacacagauuu

SEQ ID NO: 9555 - RNA, 20 nt, Artificial Sequence
  SAMD9L targeting guide sequence portion
auugauaccaagaugaggua

SEQ ID NO: 9556 - RNA, 20 nt, Artificial Sequence
  SAMD9L targeting guide sequence portion
auugauauccacuggucaca

SEQ ID NO: 9557 - RNA, 20 nt, Artificial Sequence
  SAMD9L targeting guide sequence portion
auugcccuauagacaguuau

SEQ ID NO: 9558 - RNA, 20 nt, Artificial Sequence
  SAMD9L targeting guide sequence portion
auugcuuuuauaaguuuucu

SEQ ID NO: 9559 - RNA, 20 nt, Artificial Sequence
  SAMD9L targeting guide sequence portion
auuggacucaaacccacaga

SEQ ID NO: 9560 - RNA, 20 nt, Artificial Sequence
  SAMD9L targeting guide sequence portion
auuuaaaacauuaaaagauu

SEQ ID NO: 9561 - RNA, 20 nt, Artificial Sequence
  SAMD9L targeting guide sequence portion
auuuaaauaagaugaaugua

SEQ ID NO: 9562 - RNA, 20 nt, Artificial Sequence
  SAMD9L targeting guide sequence portion
auuuaaaucuuugcugucac

SEQ ID NO: 9563 - RNA, 20 nt, Artificial Sequence
  SAMD9L targeting guide sequence portion
auuuaccucaucuugguauc

SEQ ID NO: 9564 - RNA, 20 nt, Artificial Sequence
  SAMD9L targeting guide sequence portion
auuuagaaaacuuauaaaag

SEQ ID NO: 9565 - RNA, 20 nt, Artificial Sequence
  SAMD9L targeting guide sequence portion
auuuauaucuuuaugauuuu

SEQ ID NO: 9566 - RNA, 20 nt, Artificial Sequence
  SAMD9L targeting guide sequence portion
auuucauaucuuaaaaaggc

SEQ ID NO: 9567 - RNA, 20 nt, Artificial Sequence
  SAMD9L targeting guide sequence portion
auuucuucacugugacagca

SEQ ID NO: 9568 - RNA, 20 nt, Artificial Sequence
  SAMD9L targeting guide sequence portion
auuugaacuacaggugaugu

SEQ ID NO: 9569 - RNA, 20 nt, Artificial Sequence
  SAMD9L targeting guide sequence portion
auuugagucugaaaaugcau

SEQ ID NO: 9570 - RNA, 20 nt, Artificial Sequence
  SAMD9L targeting guide sequence portion
auuuuauucucucucucuau

SEQ ID NO: 9571 - RNA, 20 nt, Artificial Sequence
  SAMD9L targeting guide sequence portion
auuuuauugcccuauagaca

SEQ ID NO: 9572 - RNA, 20 nt, Artificial Sequence
  SAMD9L targeting guide sequence portion
auuuucagacucaaauaauu

SEQ ID NO: 9573 - RNA, 20 nt, Artificial Sequence
  SAMD9L targeting guide sequence portion
auuuugcuuuugccucccug

SEQ ID NO: 9574 - RNA, 20 nt, Artificial Sequence
  SAMD9L targeting guide sequence portion
caaaagcaaaaucuguaauu

SEQ ID NO: 9575 - RNA, 20 nt, Artificial Sequence
  SAMD9L targeting guide sequence portion
caaaaucuguaauuagaggu

SEQ ID NO: 9576 - RNA, 20 nt, Artificial Sequence
  SAMD9L targeting guide sequence portion
caaacccacagauccacacc

SEQ ID NO: 9577 - RNA, 20 nt, Artificial Sequence
  SAMD9L targeting guide sequence portion
caaagauuuaaauaagauga

SEQ ID NO: 9578 - RNA, 20 nt, Artificial Sequence
  SAMD9L targeting guide sequence portion
caaaguggagucaaucuuuu

SEQ ID NO: 9579 - RNA, 20 nt, Artificial Sequence
  SAMD9L targeting guide sequence portion
caaauaauuaagaaguuuca

SEQ ID NO: 9580 - RNA, 20 nt, Artificial Sequence
  SAMD9L targeting guide sequence portion
caagaugagguaaauagaac

SEQ ID NO: 9581 - RNA, 20 nt, Artificial Sequence
  SAMD9L targeting guide sequence portion
caagccuuuuuaagauauga

SEQ ID NO: 9582 - RNA, 20 nt, Artificial Sequence
  SAMD9L targeting guide sequence portion
caagcucugcggguaggcau

SEQ ID NO: 9583 - RNA, 20 nt, Artificial Sequence
  SAMD9L targeting guide sequence portion
caauaaaaucuguguuaaac

SEQ ID NO: 9584 - RNA, 20 nt, Artificial Sequence
  SAMD9L targeting guide sequence portion
caauaagcuuucucuuuuac

SEQ ID NO: 9585 - RNA, 20 nt, Artificial Sequence
  SAMD9L targeting guide sequence portion
caaucuuuuaauguuuuaaa

SEQ ID NO: 9586 - RNA, 20 nt, Artificial Sequence
  SAMD9L targeting guide sequence portion
caaugaaacuucuuaauuau

SEQ ID NO: 9587 - RNA, 20 nt, Artificial Sequence
  SAMD9L targeting guide sequence portion
caauugaguuuaacacagau

SEQ ID NO: 9588 - RNA, 20 nt, Artificial Sequence
  SAMD9L targeting guide sequence portion
caauugcuuuuauaaguuuu

SEQ ID NO: 9589 - RNA, 20 nt, Artificial Sequence
  SAMD9L targeting guide sequence portion
cacaaaguggagucaaucuu

SEQ ID NO: 9590 - RNA, 20 nt, Artificial Sequence
  SAMD9L targeting guide sequence portion
cacaccagaguucuauuuac

SEQ ID NO: 9591 - RNA, 20 nt, Artificial Sequence
  SAMD9L targeting guide sequence portion
cacagauccacaccagaguu

SEQ ID NO: 9592 - RNA, 20 nt, Artificial Sequence
  SAMD9L targeting guide sequence portion
cacagauuuuauugcccuau

SEQ ID NO: 9593 - RNA, 20 nt, Artificial Sequence
  SAMD9L targeting guide sequence portion
cacagugaagaaauaauuua

SEQ ID NO: 9594 - RNA, 20 nt, Artificial Sequence
  SAMD9L targeting guide sequence portion
cacaucauaacugucuauag

SEQ ID NO: 9595 - RNA, 20 nt, Artificial Sequence
  SAMD9L targeting guide sequence portion
caccagaguucuauuuaccu

SEQ ID NO: 9596 - RNA, 20 nt, Artificial Sequence
  SAMD9L targeting guide sequence portion
cacuggucacaucauaacug

SEQ ID NO: 9597 - RNA, 20 nt, Artificial Sequence
  SAMD9L targeting guide sequence portion
cacugugacagcaaagauuu

SEQ ID NO: 9598 - RNA, 20 nt, Artificial Sequence
  SAMD9L targeting guide sequence portion
cacuuucauaacauuauggc

SEQ ID NO: 9599 - RNA, 20 nt, Artificial Sequence
  SAMD9L targeting guide sequence portion
cacuuugugccaagcucugc

SEQ ID NO: 9600 - RNA, 20 nt, Artificial Sequence
  SAMD9L targeting guide sequence portion
cagacucaaauaauuaagaa

SEQ ID NO: 9601 - RNA, 20 nt, Artificial Sequence
  SAMD9L targeting guide sequence portion
cagagcuuggcacaaagugg

SEQ ID NO: 9602 - RNA, 20 nt, Artificial Sequence
  SAMD9L targeting guide sequence portion
cagaguucuauuuaccucau

SEQ ID NO: 9603 - RNA, 20 nt, Artificial Sequence
  SAMD9L targeting guide sequence portion
cagauccacaccagaguucu

SEQ ID NO: 9604 - RNA, 20 nt, Artificial Sequence
  SAMD9L targeting guide sequence portion
cagauuuuauugcccuauag

SEQ ID NO: 9605 - RNA, 20 nt, Artificial Sequence
  SAMD9L targeting guide sequence portion
cagauuuugcuuuugccucc

SEQ ID NO: 9606 - RNA, 20 nt, Artificial Sequence
  SAMD9L targeting guide sequence portion
cagcaaagauuuaaauaaga

SEQ ID NO: 9607 - RNA, 20 nt, Artificial Sequence
  SAMD9L targeting guide sequence portion
cagggaggcaaaagcaaaau

SEQ ID NO: 9608 - RNA, 20 nt, Artificial Sequence
  SAMD9L targeting guide sequence portion
cagugaagaaauaauuuaga

SEQ ID NO: 9609 - RNA, 20 nt, Artificial Sequence
  SAMD9L targeting guide sequence portion
caguggauaucaaugaaacu

SEQ ID NO: 9610 - RNA, 20 nt, Artificial Sequence
  SAMD9L targeting guide sequence portion
caguuaugaugugaccagug

SEQ ID NO: 9611 - RNA, 20 nt, Artificial Sequence
  SAMD9L targeting guide sequence portion
cauaacauuauggcuaaccu

SEQ ID NO: 9612 - RNA, 20 nt, Artificial Sequence
  SAMD9L targeting guide sequence portion
cauaacugucuauagggcaa

SEQ ID NO: 9613 - RNA, 20 nt, Artificial Sequence
  SAMD9L targeting guide sequence portion
cauaauguuaugaaagugcc

SEQ ID NO: 9614 - RNA, 20 nt, Artificial Sequence
  SAMD9L targeting guide sequence portion
cauaucuuaaaaaggcuugu

SEQ ID NO: 9615 - RNA, 20 nt, Artificial Sequence
  SAMD9L targeting guide sequence portion
cauauuuaaaacauuaaaag

SEQ ID NO: 9616 - RNA, 20 nt, Artificial Sequence
  SAMD9L targeting guide sequence portion
cauauuucauaucuuaaaaa

SEQ ID NO: 9617 - RNA, 20 nt, Artificial Sequence
  SAMD9L targeting guide sequence portion
caucauaacugucuauaggg

SEQ ID NO: 9618 - RNA, 20 nt, Artificial Sequence
  SAMD9L targeting guide sequence portion
caucuuauuuaaaucuuugc

SEQ ID NO: 9619 - RNA, 20 nt, Artificial Sequence
  SAMD9L targeting guide sequence portion
caugagaauagagagagaga

SEQ ID NO: 9620 - RNA, 20 nt, Artificial Sequence
  SAMD9L targeting guide sequence portion
cauggcacuuucauaacauu

SEQ ID NO: 9621 - RNA, 20 nt, Artificial Sequence
  SAMD9L targeting guide sequence portion
cauuaaaagauugacuccac

SEQ ID NO: 9622 - RNA, 20 nt, Artificial Sequence
  SAMD9L targeting guide sequence portion
cauuauggcuaaccucuaau

SEQ ID NO: 9623 - RNA, 20 nt, Artificial Sequence
  SAMD9L targeting guide sequence portion
cauucagggaggcaaaagca

SEQ ID NO: 9624 - RNA, 20 nt, Artificial Sequence
  SAMD9L targeting guide sequence portion
cauucaucuuauuuaaaucu

SEQ ID NO: 9625 - RNA, 20 nt, Artificial Sequence
  SAMD9L targeting guide sequence portion
cauugauauccacuggucac

SEQ ID NO: 9626 - RNA, 20 nt, Artificial Sequence
  SAMD9L targeting guide sequence portion
cauuuucagacucaaauaau

SEQ ID NO: 9627 - RNA, 20 nt, Artificial Sequence
  SAMD9L targeting guide sequence portion
ccaagaugagguaaauagaa

SEQ ID NO: 9628 - RNA, 20 nt, Artificial Sequence
  SAMD9L targeting guide sequence portion
ccaagcucugcggguaggca

SEQ ID NO: 9629 - RNA, 20 nt, Artificial Sequence
  SAMD9L targeting guide sequence portion
ccaauaagcuuucucuuuua

SEQ ID NO: 9630 - RNA, 20 nt, Artificial Sequence
  SAMD9L targeting guide sequence portion
ccacaccagaguucuauuua

SEQ ID NO: 9631 - RNA, 20 nt, Artificial Sequence
  SAMD9L targeting guide sequence portion
ccacagauccacaccagagu

SEQ ID NO: 9632 - RNA, 20 nt, Artificial Sequence
  SAMD9L targeting guide sequence portion
ccacuggucacaucauaacu

SEQ ID NO: 9633 - RNA, 20 nt, Artificial Sequence
  SAMD9L targeting guide sequence portion
ccacuuugugccaagcucug

SEQ ID NO: 9634 - RNA, 20 nt, Artificial Sequence
  SAMD9L targeting guide sequence portion
ccagaguucuauuuaccuca

SEQ ID NO: 9635 - RNA, 20 nt, Artificial Sequence
  SAMD9L targeting guide sequence portion
ccaguggauaucaaugaaac

SEQ ID NO: 9636 - RNA, 20 nt, Artificial Sequence
  SAMD9L targeting guide sequence portion
ccauaauguuaugaaagugc

SEQ ID NO: 9637 - RNA, 20 nt, Artificial Sequence
  SAMD9L targeting guide sequence portion
ccaugagaauagagagagag

SEQ ID NO: 9638 - RNA, 20 nt, Artificial Sequence
  SAMD9L targeting guide sequence portion
cccacagauccacaccagag

SEQ ID NO: 9639 - RNA, 20 nt, Artificial Sequence
  SAMD9L targeting guide sequence portion
cccgcagagcuuggcacaaa

SEQ ID NO: 9640 - RNA, 20 nt, Artificial Sequence
  SAMD9L targeting guide sequence portion
cccuauagacaguuaugaug

SEQ ID NO: 9641 - RNA, 20 nt, Artificial Sequence
  SAMD9L targeting guide sequence portion
cccugaaugaauuacaagcc

SEQ ID NO: 9642 - RNA, 20 nt, Artificial Sequence
  SAMD9L targeting guide sequence portion
ccgcagagcuuggcacaaag

SEQ ID NO: 9643 - RNA, 20 nt, Artificial Sequence
  SAMD9L targeting guide sequence portion
ccuacccgcagagcuuggca

SEQ ID NO: 9644 - RNA, 20 nt, Artificial Sequence
  SAMD9L targeting guide sequence portion
ccuauagacaguuaugaugu

SEQ ID NO: 9645 - RNA, 20 nt, Artificial Sequence
  SAMD9L targeting guide sequence portion
ccucccugaaugaauuacaa

SEQ ID NO: 9646 - RNA, 20 nt, Artificial Sequence
  SAMD9L targeting guide sequence portion
ccucuaauuacagauuuugc

SEQ ID NO: 9647 - RNA, 20 nt, Artificial Sequence
  SAMD9L targeting guide sequence portion
ccugaaugaauuacaagccu

SEQ ID NO: 9648 - RNA, 20 nt, Artificial Sequence
  SAMD9L targeting guide sequence portion
ccuuuuuaagauaugaaaua

SEQ ID NO: 9649 - RNA, 20 nt, Artificial Sequence
  SAMD9L targeting guide sequence portion
cgcagagcuuggcacaaagu

SEQ ID NO: 9650 - RNA, 20 nt, Artificial Sequence
  SAMD9L targeting guide sequence portion
cggguaggcauauuucauau

SEQ ID NO: 9651 - RNA, 20 nt, Artificial Sequence
  SAMD9L targeting guide sequence portion
cuaaauuauuucuucacugu

SEQ ID NO: 9652 - RNA, 20 nt, Artificial Sequence
  SAMD9L targeting guide sequence portion
cuaaccucuaauuacagauu

SEQ ID NO: 9653 - RNA, 20 nt, Artificial Sequence
  SAMD9L targeting guide sequence portion
cuaauuacagauuuugcuuu

SEQ ID NO: 9654 - RNA, 20 nt, Artificial Sequence
  SAMD9L targeting guide sequence portion
cuacccgcagagcuuggcac

SEQ ID NO: 9655 - RNA, 20 nt, Artificial Sequence
  SAMD9L targeting guide sequence portion
cuauagacaguuaugaugug

SEQ ID NO: 9656 - RNA, 20 nt, Artificial Sequence
  SAMD9L targeting guide sequence portion
cuauagggcaauaaaaucug

SEQ ID NO: 9657 - RNA, 20 nt, Artificial Sequence
  SAMD9L targeting guide sequence portion
cuauucucauggcacuuuca

SEQ ID NO: 9658 - RNA, 20 nt, Artificial Sequence
  SAMD9L targeting guide sequence portion
cuauuuaccucaucuuggua

SEQ ID NO: 9659 - RNA, 20 nt, Artificial Sequence
  SAMD9L targeting guide sequence portion
cucaaacccacagauccaca

SEQ ID NO: 9660 - RNA, 20 nt, Artificial Sequence
  SAMD9L targeting guide sequence portion
cucaaauaauuaagaaguuu

SEQ ID NO: 9661 - RNA, 20 nt, Artificial Sequence
  SAMD9L targeting guide sequence portion
cucaauugcuuuuauaaguu

SEQ ID NO: 9662 - RNA, 20 nt, Artificial Sequence
  SAMD9L targeting guide sequence portion
cucauggcacuuucauaaca

SEQ ID NO: 9663 - RNA, 20 nt, Artificial Sequence
  SAMD9L targeting guide sequence portion
cuccacuuugugccaagcuc

SEQ ID NO: 9664 - RNA, 20 nt, Artificial Sequence
  SAMD9L targeting guide sequence portion
cucccugaaugaauuacaag

SEQ ID NO: 9665 - RNA, 20 nt, Artificial Sequence
  SAMD9L targeting guide sequence portion
cucuaauuacagauuuugcu

SEQ ID NO: 9666 - RNA, 20 nt, Artificial Sequence
  SAMD9L targeting guide sequence portion
cucuauucucauggcacuuu

SEQ ID NO: 9667 - RNA, 20 nt, Artificial Sequence
  SAMD9L targeting guide sequence portion
cucucuauucucauggcacu

SEQ ID NO: 9668 - RNA, 20 nt, Artificial Sequence
  SAMD9L targeting guide sequence portion
cucucucuauucucauggca

SEQ ID NO: 9669 - RNA, 20 nt, Artificial Sequence
  SAMD9L targeting guide sequence portion
cucucucucuauucucaugg

SEQ ID NO: 9670 - RNA, 20 nt, Artificial Sequence
  SAMD9L targeting guide sequence portion
cucugcggguaggcauauuu

SEQ ID NO: 9671 - RNA, 20 nt, Artificial Sequence
  SAMD9L targeting guide sequence portion
cucugguguggaucuguggg

SEQ ID NO: 9672 - RNA, 20 nt, Artificial Sequence
  SAMD9L targeting guide sequence portion
cucuuuuacauucaucuuau

SEQ ID NO: 9673 - RNA, 20 nt, Artificial Sequence
  SAMD9L targeting guide sequence portion
cugaaaaugcauauuuaaaa

SEQ ID NO: 9674 - RNA, 20 nt, Artificial Sequence
  SAMD9L targeting guide sequence portion
cugaaugaauuacaagccuu

SEQ ID NO: 9675 - RNA, 20 nt, Artificial Sequence
  SAMD9L targeting guide sequence portion
cugcggguaggcauauuuca

SEQ ID NO: 9676 - RNA, 20 nt, Artificial Sequence
  SAMD9L targeting guide sequence portion
cuggucacaucauaacuguc

SEQ ID NO: 9677 - RNA, 20 nt, Artificial Sequence
  SAMD9L targeting guide sequence portion
cugguguggaucuguggguu

SEQ ID NO: 9678 - RNA, 20 nt, Artificial Sequence
  SAMD9L targeting guide sequence portion
cuguaauuagagguuagcca

SEQ ID NO: 9679 - RNA, 20 nt, Artificial Sequence
  SAMD9L targeting guide sequence portion
cugucacagugaagaaauaa

SEQ ID NO: 9680 - RNA, 20 nt, Artificial Sequence
  SAMD9L targeting guide sequence portion
cugucuauagggcaauaaaa

SEQ ID NO: 9681 - RNA, 20 nt, Artificial Sequence
  SAMD9L targeting guide sequence portion
cugugacagcaaagauuuaa

SEQ ID NO: 9682 - RNA, 20 nt, Artificial Sequence
  SAMD9L targeting guide sequence portion
cuguggguuugaguccaaua

SEQ ID NO: 9683 - RNA, 20 nt, Artificial Sequence
  SAMD9L targeting guide sequence portion
cuguguuaaacucaauugcu

SEQ ID NO: 9684 - RNA, 20 nt, Artificial Sequence
  SAMD9L targeting guide sequence portion
cuuaaaaaggcuuguaauuc

SEQ ID NO: 9685 - RNA, 20 nt, Artificial Sequence
  SAMD9L targeting guide sequence portion
cuuaauuauuugagucugaa

SEQ ID NO: 9686 - RNA, 20 nt, Artificial Sequence
  SAMD9L targeting guide sequence portion
cuuauaaaagcaauugaguu

SEQ ID NO: 9687 - RNA, 20 nt, Artificial Sequence
  SAMD9L targeting guide sequence portion
cuuauuggacucaaacccac

SEQ ID NO: 9688 - RNA, 20 nt, Artificial Sequence
  SAMD9L targeting guide sequence portion
cuuauuuaaaucuuugcugu

SEQ ID NO: 9689 - RNA, 20 nt, Artificial Sequence
  SAMD9L targeting guide sequence portion
cuucacugugacagcaaaga

SEQ ID NO: 9690 - RNA, 20 nt, Artificial Sequence
  SAMD9L targeting guide sequence portion
cuucuuaauuauuugagucu

SEQ ID NO: 9691 - RNA, 20 nt, Artificial Sequence
  SAMD9L targeting guide sequence portion
cuuggcacaaaguggaguca

SEQ ID NO: 9692 - RNA, 20 nt, Artificial Sequence
  SAMD9L targeting guide sequence portion
cuuguaauucauucagggag

SEQ ID NO: 9693 - RNA, 20 nt, Artificial Sequence
  SAMD9L targeting guide sequence portion
cuuuaugauuuuauucucuc

SEQ ID NO: 9694 - RNA, 20 nt, Artificial Sequence
  SAMD9L targeting guide sequence portion
cuuucauaacauuauggcua

SEQ ID NO: 9695 - RNA, 20 nt, Artificial Sequence
  SAMD9L targeting guide sequence portion
cuuucucuuuuacauucauc

SEQ ID NO: 9696 - RNA, 20 nt, Artificial Sequence
  SAMD9L targeting guide sequence portion
cuuugcugucacagugaaga

SEQ ID NO: 9697 - RNA, 20 nt, Artificial Sequence
  SAMD9L targeting guide sequence portion
cuuugugccaagcucugcgg

SEQ ID NO: 9698 - RNA, 20 nt, Artificial Sequence
  SAMD9L targeting guide sequence portion
cuuuuaauguuuuaaauaug

SEQ ID NO: 9699 - RNA, 20 nt, Artificial Sequence
  SAMD9L targeting guide sequence portion
cuuuuacauucaucuuauuu

SEQ ID NO: 9700 - RNA, 20 nt, Artificial Sequence
  SAMD9L targeting guide sequence portion
cuuuuauaaguuuucuaaau

SEQ ID NO: 9701 - RNA, 20 nt, Artificial Sequence
  SAMD9L targeting guide sequence portion
cuuuugccucccugaaugaa

SEQ ID NO: 9702 - RNA, 20 nt, Artificial Sequence
  SAMD9L targeting guide sequence portion
cuuuuuaagauaugaaauau

SEQ ID NO: 9703 - RNA, 20 nt, Artificial Sequence
  SAMD9L targeting guide sequence portion
gaaaacuuauaaaagcaauu

SEQ ID NO: 9704 - RNA, 20 nt, Artificial Sequence
  SAMD9L targeting guide sequence portion
gaaaaugcauauuuaaaaca

SEQ ID NO: 9705 - RNA, 20 nt, Artificial Sequence
  SAMD9L targeting guide sequence portion
gaaacuucuuaauuauuuga

SEQ ID NO: 9706 - RNA, 20 nt, Artificial Sequence
  SAMD9L targeting guide sequence portion
gaaagcuuauuggacucaaa

SEQ ID NO: 9707 - RNA, 20 nt, Artificial Sequence
  SAMD9L targeting guide sequence portion
gaaagugccaugagaauaga

SEQ ID NO: 9708 - RNA, 20 nt, Artificial Sequence
  SAMD9L targeting guide sequence portion
gaaauaauuuagaaaacuua

SEQ ID NO: 9709 - RNA, 20 nt, Artificial Sequence
  SAMD9L targeting guide sequence portion
gaaauaugccuacccgcaga

SEQ ID NO: 9710 - RNA, 20 nt, Artificial Sequence
  SAMD9L targeting guide sequence portion
gaacucugguguggaucugu

SEQ ID NO: 9711 - RNA, 20 nt, Artificial Sequence
  SAMD9L targeting guide sequence portion
gaagaaauaauuuagaaaac

SEQ ID NO: 9712 - RNA, 20 nt, Artificial Sequence
  SAMD9L targeting guide sequence portion
gaagguaaauauauuguucc

SEQ ID NO: 9713 - RNA, 20 nt, Artificial Sequence
  SAMD9L targeting guide sequence portion
gaaguuucauugauauccac

SEQ ID NO: 9714 - RNA, 20 nt, Artificial Sequence
  SAMD9L targeting guide sequence portion
gaauaaaaucauaaagauau

SEQ ID NO: 9715 - RNA, 20 nt, Artificial Sequence
  SAMD9L targeting guide sequence portion
gaauagagagagagaauaaa

SEQ ID NO: 9716 - RNA, 20 nt, Artificial Sequence
  SAMD9L targeting guide sequence portion
gaaugaauuacaagccuuuu

SEQ ID NO: 9717 - RNA, 20 nt, Artificial Sequence
  SAMD9L targeting guide sequence portion
gaauguaaaagagaaagcuu

SEQ ID NO: 9718 - RNA, 20 nt, Artificial Sequence
  SAMD9L targeting guide sequence portion
gaauuacaagccuuuuuaag

SEQ ID NO: 9719 - RNA, 20 nt, Artificial Sequence
  SAMD9L targeting guide sequence portion
gacaauacaucaccuguagu

SEQ ID NO: 9720 - RNA, 20 nt, Artificial Sequence
  SAMD9L targeting guide sequence portion
gacagcaaagauuuaaauaa

SEQ ID NO: 9721 - RNA, 20 nt, Artificial Sequence
  SAMD9L targeting guide sequence portion
gacaguuaugaugugaccag

SEQ ID NO: 9722 - RNA, 20 nt, Artificial Sequence
  SAMD9L targeting guide sequence portion
gaccaguggauaucaaugaa

SEQ ID NO: 9723 - RNA, 20 nt, Artificial Sequence
  SAMD9L targeting guide sequence portion
gacucaaacccacagaucca

SEQ ID NO: 9724 - RNA, 20 nt, Artificial Sequence
  SAMD9L targeting guide sequence portion
gacucaaauaauuaagaagu

SEQ ID NO: 9725 - RNA, 20 nt, Artificial Sequence
  SAMD9L targeting guide sequence portion
gacuccacuuugugccaagc

SEQ ID NO: 9726 - RNA, 20 nt, Artificial Sequence
  SAMD9L targeting guide sequence portion
gagaaagcuuauuggacuca

SEQ ID NO: 9727 - RNA, 20 nt, Artificial Sequence
  SAMD9L targeting guide sequence portion
gagaauaaaaucauaaagau

SEQ ID NO: 9728 - RNA, 20 nt, Artificial Sequence
  SAMD9L targeting guide sequence portion
gagaauagagagagagaaua

SEQ ID NO: 9729 - RNA, 20 nt, Artificial Sequence
  SAMD9L targeting guide sequence portion
gagagaauaaaaucauaaag

SEQ ID NO: 9730 - RNA, 20 nt, Artificial Sequence
  SAMD9L targeting guide sequence portion
gagagagaauaaaaucauaa

SEQ ID NO: 9731 - RNA, 20 nt, Artificial Sequence
  SAMD9L targeting guide sequence portion
gagagagagaauaaaaucau

SEQ ID NO: 9732 - RNA, 20 nt, Artificial Sequence
  SAMD9L targeting guide sequence portion
gagcuuggcacaaaguggag

SEQ ID NO: 9733 - RNA, 20 nt, Artificial Sequence
  SAMD9L targeting guide sequence portion
gaggcaaaagcaaaaucugu

SEQ ID NO: 9734 - RNA, 20 nt, Artificial Sequence
  SAMD9L targeting guide sequence portion
gagguaaauagaacucuggu

SEQ ID NO: 9735 - RNA, 20 nt, Artificial Sequence
  SAMD9L targeting guide sequence portion
gagguuagccauaauguuau

SEQ ID NO: 9736 - RNA, 20 nt, Artificial Sequence
  SAMD9L targeting guide sequence portion
gagucaaucuuuuaauguuu

SEQ ID NO: 9737 - RNA, 20 nt, Artificial Sequence
  SAMD9L targeting guide sequence portion
gaguccaauaagcuuucucu

SEQ ID NO: 9738 - RNA, 20 nt, Artificial Sequence
  SAMD9L targeting guide sequence portion
gagucugaaaaugcauauuu

SEQ ID NO: 9739 - RNA, 20 nt, Artificial Sequence
  SAMD9L targeting guide sequence portion
gaguucuauuuaccucaucu

SEQ ID NO: 9740 - RNA, 20 nt, Artificial Sequence
  SAMD9L targeting guide sequence portion
gaguuuaacacagauuuuau

SEQ ID NO: 9741 - RNA, 20 nt, Artificial Sequence
  SAMD9L targeting guide sequence portion
gauaccaagaugagguaaau

SEQ ID NO: 9742 - RNA, 20 nt, Artificial Sequence
  SAMD9L targeting guide sequence portion
gauaucaaugaaacuucuua

SEQ ID NO: 9743 - RNA, 20 nt, Artificial Sequence
  SAMD9L targeting guide sequence portion
gauauccacuggucacauca

SEQ ID NO: 9744 - RNA, 20 nt, Artificial Sequence
  SAMD9L targeting guide sequence portion
gauaugaaauaugccuaccc

SEQ ID NO: 9745 - RNA, 20 nt, Artificial Sequence
  SAMD9L targeting guide sequence portion
gauccacaccagaguucuau

SEQ ID NO: 9746 - RNA, 20 nt, Artificial Sequence
  SAMD9L targeting guide sequence portion
gaucuguggguuugagucca

SEQ ID NO: 9747 - RNA, 20 nt, Artificial Sequence
  SAMD9L targeting guide sequence portion
gaugaauguaaaagagaaag

SEQ ID NO: 9748 - RNA, 20 nt, Artificial Sequence
  SAMD9L targeting guide sequence portion
gaugagguaaauagaacucu

SEQ ID NO: 9749 - RNA, 20 nt, Artificial Sequence
  SAMD9L targeting guide sequence portion
gauggggaacaauauauuua

SEQ ID NO: 9750 - RNA, 20 nt, Artificial Sequence
  SAMD9L targeting guide sequence portion
gaugugaccaguggauauca

SEQ ID NO: 9751 - RNA, 20 nt, Artificial Sequence
  SAMD9L targeting guide sequence portion
gauugacuccacuuugugcc

SEQ ID NO: 9752 - RNA, 20 nt, Artificial Sequence
  SAMD9L targeting guide sequence portion
gauuuaaauaagaugaaugu

SEQ ID NO: 9753 - RNA, 20 nt, Artificial Sequence
  SAMD9L targeting guide sequence portion
gauuuuauucucucucucua

SEQ ID NO: 9754 - RNA, 20 nt, Artificial Sequence
  SAMD9L targeting guide sequence portion
gauuuuauugcccuauagac

SEQ ID NO: 9755 - RNA, 20 nt, Artificial Sequence
  SAMD9L targeting guide sequence portion
gauuuugcuuuugccucccu

SEQ ID NO: 9756 - RNA, 20 nt, Artificial Sequence
  SAMD9L targeting guide sequence portion
gcaaaagcaaaaucuguaau

SEQ ID NO: 9757 - RNA, 20 nt, Artificial Sequence
  SAMD9L targeting guide sequence portion
gcaaaaucuguaauuagagg

SEQ ID NO: 9758 - RNA, 20 nt, Artificial Sequence
  SAMD9L targeting guide sequence portion
gcaaagauuuaaauaagaug

SEQ ID NO: 9759 - RNA, 20 nt, Artificial Sequence
  SAMD9L targeting guide sequence portion
gcaauaaaaucuguguuaaa

SEQ ID NO: 9760 - RNA, 20 nt, Artificial Sequence
  SAMD9L targeting guide sequence portion
gcaauugaguuuaacacaga

SEQ ID NO: 9761 - RNA, 20 nt, Artificial Sequence
  SAMD9L targeting guide sequence portion
gcacaaaguggagucaaucu

SEQ ID NO: 9762 - RNA, 20 nt, Artificial Sequence
  SAMD9L targeting guide sequence portion
gcacuuucauaacauuaugg

SEQ ID NO: 9763 - RNA, 20 nt, Artificial Sequence
  SAMD9L targeting guide sequence portion
gcagagcuuggcacaaagug

SEQ ID NO: 9764 - RNA, 20 nt, Artificial Sequence
  SAMD9L targeting guide sequence portion
gcauauuuaaaacauuaaaa

SEQ ID NO: 9765 - RNA, 20 nt, Artificial Sequence
  SAMD9L targeting guide sequence portion
gcauauuucauaucuuaaaa

SEQ ID NO: 9766 - RNA, 20 nt, Artificial Sequence
  SAMD9L targeting guide sequence portion
gcauuuucagacucaaauaa

SEQ ID NO: 9767 - RNA, 20 nt, Artificial Sequence
  SAMD9L targeting guide sequence portion
gccaagcucugcggguaggc

SEQ ID NO: 9768 - RNA, 20 nt, Artificial Sequence
  SAMD9L targeting guide sequence portion
gccauaauguuaugaaagug

SEQ ID NO: 9769 - RNA, 20 nt, Artificial Sequence
  SAMD9L targeting guide sequence portion
gccaugagaauagagagaga

SEQ ID NO: 9770 - RNA, 20 nt, Artificial Sequence
  SAMD9L targeting guide sequence portion
gcccuauagacaguuaugau

SEQ ID NO: 9771 - RNA, 20 nt, Artificial Sequence
  SAMD9L targeting guide sequence portion
gccuacccgcagagcuuggc

SEQ ID NO: 9772 - RNA, 20 nt, Artificial Sequence
  SAMD9L targeting guide sequence portion
gccucccugaaugaauuaca

SEQ ID NO: 9773 - RNA, 20 nt, Artificial Sequence
  SAMD9L targeting guide sequence portion
gccuuuuuaagauaugaaau

SEQ ID NO: 9774 - RNA, 20 nt, Artificial Sequence
  SAMD9L targeting guide sequence portion
gcggguaggcauauuucaua

SEQ ID NO: 9775 - RNA, 20 nt, Artificial Sequence
  SAMD9L targeting guide sequence portion
gcuaaccucuaauuacagau

SEQ ID NO: 9776 - RNA, 20 nt, Artificial Sequence
  SAMD9L targeting guide sequence portion
gcucugcggguaggcauauu

SEQ ID NO: 9777 - RNA, 20 nt, Artificial Sequence
  SAMD9L targeting guide sequence portion
gcugucacagugaagaaaua

SEQ ID NO: 9778 - RNA, 20 nt, Artificial Sequence
  SAMD9L targeting guide sequence portion
gcuuauuggacucaaaccca

SEQ ID NO: 9779 - RNA, 20 nt, Artificial Sequence
  SAMD9L targeting guide sequence portion
gcuuggcacaaaguggaguc

SEQ ID NO: 9780 - RNA, 20 nt, Artificial Sequence
  SAMD9L targeting guide sequence portion
gcuuguaauucauucaggga

SEQ ID NO: 9781 - RNA, 20 nt, Artificial Sequence
  SAMD9L targeting guide sequence portion
gcuuucucuuuuacauucau

SEQ ID NO: 9782 - RNA, 20 nt, Artificial Sequence
  SAMD9L targeting guide sequence portion
gcuuuuauaaguuuucuaaa

SEQ ID NO: 9783 - RNA, 20 nt, Artificial Sequence
  SAMD9L targeting guide sequence portion
gcuuuugccucccugaauga

SEQ ID NO: 9784 - RNA, 20 nt, Artificial Sequence
  SAMD9L targeting guide sequence portion
ggaagguaaauauauuguuc

SEQ ID NO: 9785 - RNA, 20 nt, Artificial Sequence
  SAMD9L targeting guide sequence portion
ggacucaaacccacagaucc

SEQ ID NO: 9786 - RNA, 20 nt, Artificial Sequence
  SAMD9L targeting guide sequence portion
ggaggcaaaagcaaaaucug

SEQ ID NO: 9787 - RNA, 20 nt, Artificial Sequence
  SAMD9L targeting guide sequence portion
ggagucaaucuuuuaauguu

SEQ ID NO: 9788 - RNA, 20 nt, Artificial Sequence
  SAMD9L targeting guide sequence portion
ggauaucaaugaaacuucuu

SEQ ID NO: 9789 - RNA, 20 nt, Artificial Sequence
  SAMD9L targeting guide sequence portion
ggaucuguggguuugagucc

SEQ ID NO: 9790 - RNA, 20 nt, Artificial Sequence
  SAMD9L targeting guide sequence portion
ggauggggaacaauauauuu

SEQ ID NO: 9791 - RNA, 20 nt, Artificial Sequence
  SAMD9L targeting guide sequence portion
ggcaaaagcaaaaucuguaa

SEQ ID NO: 9792 - RNA, 20 nt, Artificial Sequence
  SAMD9L targeting guide sequence portion
ggcaauaaaaucuguguuaa

SEQ ID NO: 9793 - RNA, 20 nt, Artificial Sequence
  SAMD9L targeting guide sequence portion
ggcacaaaguggagucaauc

SEQ ID NO: 9794 - RNA, 20 nt, Artificial Sequence
  SAMD9L targeting guide sequence portion
ggcacuuucauaacauuaug

SEQ ID NO: 9795 - RNA, 20 nt, Artificial Sequence
  SAMD9L targeting guide sequence portion
ggcauauuucauaucuuaaa

SEQ ID NO: 9796 - RNA, 20 nt, Artificial Sequence
  SAMD9L targeting guide sequence portion
ggcuaaccucuaauuacaga

SEQ ID NO: 9797 - RNA, 20 nt, Artificial Sequence
  SAMD9L targeting guide sequence portion
ggcuuguaauucauucaggg

SEQ ID NO: 9798 - RNA, 20 nt, Artificial Sequence
  SAMD9L targeting guide sequence portion
gggaacaauauauuuaccuu

SEQ ID NO: 9799 - RNA, 20 nt, Artificial Sequence
  SAMD9L targeting guide sequence portion
gggaggcaaaagcaaaaucu

SEQ ID NO: 9800 - RNA, 20 nt, Artificial Sequence
  SAMD9L targeting guide sequence portion
gggcaauaaaaucuguguua

SEQ ID NO: 9801 - RNA, 20 nt, Artificial Sequence
  SAMD9L targeting guide sequence portion
ggggaacaauauauuuaccu

SEQ ID NO: 9802 - RNA, 20 nt, Artificial Sequence
  SAMD9L targeting guide sequence portion
ggguaggcauauuucauauc

SEQ ID NO: 9803 - RNA, 20 nt, Artificial Sequence
  SAMD9L targeting guide sequence portion
ggguuugaguccaauaagcu

SEQ ID NO: 9804 - RNA, 20 nt, Artificial Sequence
  SAMD9L targeting guide sequence portion
gguaaauagaacucuggugu

SEQ ID NO: 9805 - RNA, 20 nt, Artificial Sequence
  SAMD9L targeting guide sequence portion
gguaaauauauuguucccca

SEQ ID NO: 9806 - RNA, 20 nt, Artificial Sequence
  SAMD9L targeting guide sequence portion
gguaggcauauuucauaucu

SEQ ID NO: 9807 - RNA, 20 nt, Artificial Sequence
  SAMD9L targeting guide sequence portion
ggucacaucauaacugucua

SEQ ID NO: 9808 - RNA, 20 nt, Artificial Sequence
  SAMD9L targeting guide sequence portion
gguggauggggaacaauaua

SEQ ID NO: 9809 - RNA, 20 nt, Artificial Sequence
  SAMD9L targeting guide sequence portion
gguguggaucuguggguuug

SEQ ID NO: 9810 - RNA, 20 nt, Artificial Sequence
  SAMD9L targeting guide sequence portion
gguuagccauaauguuauga

SEQ ID NO: 9811 - RNA, 20 nt, Artificial Sequence
  SAMD9L targeting guide sequence portion
gguuugaguccaauaagcuu

SEQ ID NO: 9812 - RNA, 20 nt, Artificial Sequence
  SAMD9L targeting guide sequence portion
guaaaagagaaagcuuauug

SEQ ID NO: 9813 - RNA, 20 nt, Artificial Sequence
  SAMD9L targeting guide sequence portion
guaaauagaacucuggugug

SEQ ID NO: 9814 - RNA, 20 nt, Artificial Sequence
  SAMD9L targeting guide sequence portion
guaaauauauuguuccccau

SEQ ID NO: 9815 - RNA, 20 nt, Artificial Sequence
  SAMD9L targeting guide sequence portion
guaauuagagguuagccaua

SEQ ID NO: 9816 - RNA, 20 nt, Artificial Sequence
  SAMD9L targeting guide sequence portion
guaauucauucagggaggca

SEQ ID NO: 9817 - RNA, 20 nt, Artificial Sequence
  SAMD9L targeting guide sequence portion
guaggcauauuucauaucuu

SEQ ID NO: 9818 - RNA, 20 nt, Artificial Sequence
  SAMD9L targeting guide sequence portion
gucaaucuuuuaauguuuua

SEQ ID NO: 9819 - RNA, 20 nt, Artificial Sequence
  SAMD9L targeting guide sequence portion
gucacagugaagaaauaauu

SEQ ID NO: 9820 - RNA, 20 nt, Artificial Sequence
  SAMD9L targeting guide sequence portion
gucacaucauaacugucuau

SEQ ID NO: 9821 - RNA, 20 nt, Artificial Sequence
  SAMD9L targeting guide sequence portion
guccaauaagcuuucucuuu

SEQ ID NO: 9822 - RNA, 20 nt, Artificial Sequence
  SAMD9L targeting guide sequence portion
gucuauagggcaauaaaauc

SEQ ID NO: 9823 - RNA, 20 nt, Artificial Sequence
  SAMD9L targeting guide sequence portion
gucugaaaaugcauauuuaa

SEQ ID NO: 9824 - RNA, 20 nt, Artificial Sequence
  SAMD9L targeting guide sequence portion
gugaagaaauaauuuagaaa

SEQ ID NO: 9825 - RNA, 20 nt, Artificial Sequence
  SAMD9L targeting guide sequence portion
gugacagcaaagauuuaaau

SEQ ID NO: 9826 - RNA, 20 nt, Artificial Sequence
  SAMD9L targeting guide sequence portion
gugaccaguggauaucaaug

SEQ ID NO: 9827 - RNA, 20 nt, Artificial Sequence
  SAMD9L targeting guide sequence portion
gugccaagcucugcggguag

SEQ ID NO: 9828 - RNA, 20 nt, Artificial Sequence
  SAMD9L targeting guide sequence portion
gugccaugagaauagagaga

SEQ ID NO: 9829 - RNA, 20 nt, Artificial Sequence
  SAMD9L targeting guide sequence portion
guggaagguaaauauauugu

SEQ ID NO: 9830 - RNA, 20 nt, Artificial Sequence
  SAMD9L targeting guide sequence portion
guggagucaaucuuuuaaug

SEQ ID NO: 9831 - RNA, 20 nt, Artificial Sequence
  SAMD9L targeting guide sequence portion
guggauaucaaugaaacuuc

SEQ ID NO: 9832 - RNA, 20 nt, Artificial Sequence
  SAMD9L targeting guide sequence portion
guggaucuguggguuugagu

SEQ ID NO: 9833 - RNA, 20 nt, Artificial Sequence
  SAMD9L targeting guide sequence portion
guggauggggaacaauauau

SEQ ID NO: 9834 - RNA, 20 nt, Artificial Sequence
  SAMD9L targeting guide sequence portion
guggguuugaguccaauaag

SEQ ID NO: 9835 - RNA, 20 nt, Artificial Sequence
  SAMD9L targeting guide sequence portion
gugguggauggggaacaaua

SEQ ID NO: 9836 - RNA, 20 nt, Artificial Sequence
  SAMD9L targeting guide sequence portion
guguggaucuguggguuuga

SEQ ID NO: 9837 - RNA, 20 nt, Artificial Sequence
  SAMD9L targeting guide sequence portion
guguuaaacucaauugcuuu

SEQ ID NO: 9838 - RNA, 20 nt, Artificial Sequence
  SAMD9L targeting guide sequence portion
guuaaacucaauugcuuuua

SEQ ID NO: 9839 - RNA, 20 nt, Artificial Sequence
  SAMD9L targeting guide sequence portion
guuagccauaauguuaugaa

SEQ ID NO: 9840 - RNA, 20 nt, Artificial Sequence
  SAMD9L targeting guide sequence portion
guuaugaaagugccaugaga

SEQ ID NO: 9841 - RNA, 20 nt, Artificial Sequence
  SAMD9L targeting guide sequence portion
guuaugaugugaccagugga

SEQ ID NO: 9842 - RNA, 20 nt, Artificial Sequence
  SAMD9L targeting guide sequence portion
guucuauuuaccucaucuug

SEQ ID NO: 9843 - RNA, 20 nt, Artificial Sequence
  SAMD9L targeting guide sequence portion
guuuaacacagauuuuauug

SEQ ID NO: 9844 - RNA, 20 nt, Artificial Sequence
  SAMD9L targeting guide sequence portion
guuuauuuauaucuuuauga

SEQ ID NO: 9845 - RNA, 20 nt, Artificial Sequence
  SAMD9L targeting guide sequence portion
guuucauugauauccacugg

SEQ ID NO: 9846 - RNA, 20 nt, Artificial Sequence
  SAMD9L targeting guide sequence portion
guuugaguccaauaagcuuu

SEQ ID NO: 9847 - RNA, 20 nt, Artificial Sequence
  SAMD9L targeting guide sequence portion
guuuuaaauaugcauuuuca

SEQ ID NO: 9848 - RNA, 20 nt, Artificial Sequence
  SAMD9L targeting guide sequence portion
guuuucuaaauuauuucuuc

SEQ ID NO: 9849 - RNA, 20 nt, Artificial Sequence
  SAMD9L targeting guide sequence portion
guuuuuauugauaccaagau

SEQ ID NO: 9850 - RNA, 20 nt, Artificial Sequence
  SAMD9L targeting guide sequence portion
uaaaaaggcuuguaauucau

SEQ ID NO: 9851 - RNA, 20 nt, Artificial Sequence
  SAMD9L targeting guide sequence portion
uaaaacauuaaaagauugac

SEQ ID NO: 9852 - RNA, 20 nt, Artificial Sequence
  SAMD9L targeting guide sequence portion
uaaaagagaaagcuuauugg

SEQ ID NO: 9853 - RNA, 20 nt, Artificial Sequence
  SAMD9L targeting guide sequence portion
uaaaagauugacuccacuuu

SEQ ID NO: 9854 - RNA, 20 nt, Artificial Sequence
  SAMD9L targeting guide sequence portion
uaaaagcaauugaguuuaac

SEQ ID NO: 9855 - RNA, 20 nt, Artificial Sequence
  SAMD9L targeting guide sequence portion
uaaaaucauaaagauauaaa

SEQ ID NO: 9856 - RNA, 20 nt, Artificial Sequence
  SAMD9L targeting guide sequence portion
uaaaaucuguguuaaacuca

SEQ ID NO: 9857 - RNA, 20 nt, Artificial Sequence
  SAMD9L targeting guide sequence portion
uaaacucaauugcuuuuaua

SEQ ID NO: 9858 - RNA, 20 nt, Artificial Sequence
  SAMD9L targeting guide sequence portion
uaaagauauaaauaaacgua

SEQ ID NO: 9859 - RNA, 20 nt, Artificial Sequence
  SAMD9L targeting guide sequence portion
uaaauaagaugaauguaaaa

SEQ ID NO: 9860 - RNA, 20 nt, Artificial Sequence
  SAMD9L targeting guide sequence portion
uaaauagaacucuggugugg

SEQ ID NO: 9861 - RNA, 20 nt, Artificial Sequence
  SAMD9L targeting guide sequence portion
uaaauauauuguuccccauc

SEQ ID NO: 9862 - RNA, 20 nt, Artificial Sequence
  SAMD9L targeting guide sequence portion
uaaauaugcauuuucagacu

SEQ ID NO: 9863 - RNA, 20 nt, Artificial Sequence
  SAMD9L targeting guide sequence portion
uaaaucuuugcugucacagu

SEQ ID NO: 9864 - RNA, 20 nt, Artificial Sequence
  SAMD9L targeting guide sequence portion
uaaauuauuucuucacugug

SEQ ID NO: 9865 - RNA, 20 nt, Artificial Sequence
  SAMD9L targeting guide sequence portion
uaacacagauuuuauugccc

SEQ ID NO: 9866 - RNA, 20 nt, Artificial Sequence
  SAMD9L targeting guide sequence portion
uaacauuauggcuaaccucu

SEQ ID NO: 9867 - RNA, 20 nt, Artificial Sequence
  SAMD9L targeting guide sequence portion
uaaccucuaauuacagauuu

SEQ ID NO: 9868 - RNA, 20 nt, Artificial Sequence
  SAMD9L targeting guide sequence portion
uaacugucuauagggcaaua

SEQ ID NO: 9869 - RNA, 20 nt, Artificial Sequence
  SAMD9L targeting guide sequence portion
uaagaaguuucauugauauc

SEQ ID NO: 9870 - RNA, 20 nt, Artificial Sequence
  SAMD9L targeting guide sequence portion
uaagauaugaaauaugccua

SEQ ID NO: 9871 - RNA, 20 nt, Artificial Sequence
  SAMD9L targeting guide sequence portion
uaagaugaauguaaaagaga

SEQ ID NO: 9872 - RNA, 20 nt, Artificial Sequence
  SAMD9L targeting guide sequence portion
uaagcuuucucuuuuacauu

SEQ ID NO: 9873 - RNA, 20 nt, Artificial Sequence
  SAMD9L targeting guide sequence portion
uaaguuuucuaaauuauuuc

SEQ ID NO: 9874 - RNA, 20 nt, Artificial Sequence
  SAMD9L targeting guide sequence portion
uaauguuaugaaagugccau

SEQ ID NO: 9875 - RNA, 20 nt, Artificial Sequence
  SAMD9L targeting guide sequence portion
uaauguuuuaaauaugcauu

SEQ ID NO: 9876 - RNA, 20 nt, Artificial Sequence
  SAMD9L targeting guide sequence portion
uaauuaagaaguuucauuga

SEQ ID NO: 9877 - RNA, 20 nt, Artificial Sequence
  SAMD9L targeting guide sequence portion
uaauuacagauuuugcuuuu

SEQ ID NO: 9878 - RNA, 20 nt, Artificial Sequence
  SAMD9L targeting guide sequence portion
uaauuagagguuagccauaa

SEQ ID NO: 9879 - RNA, 20 nt, Artificial Sequence
  SAMD9L targeting guide sequence portion
uaauuauuugagucugaaaa

SEQ ID NO: 9880 - RNA, 20 nt, Artificial Sequence
  SAMD9L targeting guide sequence portion
uaauucauucagggaggcaa

SEQ ID NO: 9881 - RNA, 20 nt, Artificial Sequence
  SAMD9L targeting guide sequence portion
uaauuuagaaaacuuauaaa

SEQ ID NO: 9882 - RNA, 20 nt, Artificial Sequence
  SAMD9L targeting guide sequence portion
uacaagccuuuuuaagauau

SEQ ID NO: 9883 - RNA, 20 nt, Artificial Sequence
  SAMD9L targeting guide sequence portion
uacagauuuugcuuuugccu

SEQ ID NO: 9884 - RNA, 20 nt, Artificial Sequence
  SAMD9L targeting guide sequence portion
uacauucaucuuauuuaaau

SEQ ID NO: 9885 - RNA, 20 nt, Artificial Sequence
  SAMD9L targeting guide sequence portion
uaccaagaugagguaaauag

SEQ ID NO: 9886 - RNA, 20 nt, Artificial Sequence
  SAMD9L targeting guide sequence portion
uacccgcagagcuuggcaca

SEQ ID NO: 9887 - RNA, 20 nt, Artificial Sequence
  SAMD9L targeting guide sequence portion
uaccucaucuugguaucaau

SEQ ID NO: 9888 - RNA, 20 nt, Artificial Sequence
  SAMD9L targeting guide sequence portion
uacguuuauuuauaucuuua

SEQ ID NO: 9889 - RNA, 20 nt, Artificial Sequence
  SAMD9L targeting guide sequence portion
uagaaaacuuauaaaagcaa

SEQ ID NO: 9890 - RNA, 20 nt, Artificial Sequence
  SAMD9L targeting guide sequence portion
uagaacucugguguggaucu

SEQ ID NO: 9891 - RNA, 20 nt, Artificial Sequence
  SAMD9L targeting guide sequence portion
uagacaguuaugaugugacc

SEQ ID NO: 9892 - RNA, 20 nt, Artificial Sequence
  SAMD9L targeting guide sequence portion
uagagagagagaauaaaauc

SEQ ID NO: 9893 - RNA, 20 nt, Artificial Sequence
  SAMD9L targeting guide sequence portion
uagagguuagccauaauguu

SEQ ID NO: 9894 - RNA, 20 nt, Artificial Sequence
  SAMD9L targeting guide sequence portion
uagccauaauguuaugaaag

SEQ ID NO: 9895 - RNA, 20 nt, Artificial Sequence
  SAMD9L targeting guide sequence portion
uaggcauauuucauaucuua

SEQ ID NO: 9896 - RNA, 20 nt, Artificial Sequence
  SAMD9L targeting guide sequence portion
uagggcaauaaaaucugugu

SEQ ID NO: 9897 - RNA, 20 nt, Artificial Sequence
  SAMD9L targeting guide sequence portion
uauaaaagcaauugaguuua

SEQ ID NO: 9898 - RNA, 20 nt, Artificial Sequence
  SAMD9L targeting guide sequence portion
uauaaauaaacguauuugaa

SEQ ID NO: 9899 - RNA, 20 nt, Artificial Sequence
  SAMD9L targeting guide sequence portion
uauaaguuuucuaaauuauu

SEQ ID NO: 9900 - RNA, 20 nt, Artificial Sequence
  SAMD9L targeting guide sequence portion
uauagacaguuaugauguga

SEQ ID NO: 9901 - RNA, 20 nt, Artificial Sequence
  SAMD9L targeting guide sequence portion
uauagggcaauaaaaucugu

SEQ ID NO: 9902 - RNA, 20 nt, Artificial Sequence
  SAMD9L targeting guide sequence portion
uauaucuuuaugauuuuauu

SEQ ID NO: 9903 - RNA, 20 nt, Artificial Sequence
  SAMD9L targeting guide sequence portion
uaucaaugaaacuucuuaau

SEQ ID NO: 9904 - RNA, 20 nt, Artificial Sequence
  SAMD9L targeting guide sequence portion
uauccacuggucacaucaua

SEQ ID NO: 9905 - RNA, 20 nt, Artificial Sequence
  SAMD9L targeting guide sequence portion
uaucuuaaaaaggcuuguaa

SEQ ID NO: 9906 - RNA, 20 nt, Artificial Sequence
  SAMD9L targeting guide sequence portion
uaucuuuaugauuuuauucu

SEQ ID NO: 9907 - RNA, 20 nt, Artificial Sequence
  SAMD9L targeting guide sequence portion
uaugaaagugccaugagaau

SEQ ID NO: 9908 - RNA, 20 nt, Artificial Sequence
  SAMD9L targeting guide sequence portion
uaugaaauaugccuacccgc

SEQ ID NO: 9909 - RNA, 20 nt, Artificial Sequence
  SAMD9L targeting guide sequence portion
uaugaugugaccaguggaua

SEQ ID NO: 9910 - RNA, 20 nt, Artificial Sequence
  SAMD9L targeting guide sequence portion
uaugauuuuauucucucucu

SEQ ID NO: 9911 - RNA, 20 nt, Artificial Sequence
  SAMD9L targeting guide sequence portion
uaugcauuuucagacucaaa

SEQ ID NO: 9912 - RNA, 20 nt, Artificial Sequence
  SAMD9L targeting guide sequence portion
uaugccuacccgcagagcuu

SEQ ID NO: 9913 - RNA, 20 nt, Artificial Sequence
  SAMD9L targeting guide sequence portion
uauggcuaaccucuaauuac

SEQ ID NO: 9914 - RNA, 20 nt, Artificial Sequence
  SAMD9L targeting guide sequence portion
uaugugguggauggggaaca

SEQ ID NO: 9915 - RNA, 20 nt, Artificial Sequence
  SAMD9L targeting guide sequence portion
uauucucauggcacuuucau

SEQ ID NO: 9916 - RNA, 20 nt, Artificial Sequence
  SAMD9L targeting guide sequence portion
uauucucucucucuauucuc

SEQ ID NO: 9917 - RNA, 20 nt, Artificial Sequence
  SAMD9L targeting guide sequence portion
uauugauaccaagaugaggu

SEQ ID NO: 9918 - RNA, 20 nt, Artificial Sequence
  SAMD9L targeting guide sequence portion
uauugcccuauagacaguua

SEQ ID NO: 9919 - RNA, 20 nt, Artificial Sequence
  SAMD9L targeting guide sequence portion
uauuggacucaaacccacag

SEQ ID NO: 9920 - RNA, 20 nt, Artificial Sequence
  SAMD9L targeting guide sequence portion
uauuuaaaacauuaaaagau

SEQ ID NO: 9921 - RNA, 20 nt, Artificial Sequence
  SAMD9L targeting guide sequence portion
uauuuaaaucuuugcuguca

SEQ ID NO: 9922 - RNA, 20 nt, Artificial Sequence
  SAMD9L targeting guide sequence portion
uauuuaccucaucuugguau

SEQ ID NO: 9923 - RNA, 20 nt, Artificial Sequence
  SAMD9L targeting guide sequence portion
uauuuauaucuuuaugauuu

SEQ ID NO: 9924 - RNA, 20 nt, Artificial Sequence
  SAMD9L targeting guide sequence portion
uauuucauaucuuaaaaagg

SEQ ID NO: 9925 - RNA, 20 nt, Artificial Sequence
  SAMD9L targeting guide sequence portion
uauuucuucacugugacagc

SEQ ID NO: 9926 - RNA, 20 nt, Artificial Sequence
  SAMD9L targeting guide sequence portion
uauuugaacuacaggugaug

SEQ ID NO: 9927 - RNA, 20 nt, Artificial Sequence
  SAMD9L targeting guide sequence portion
uauuugagucugaaaaugca

SEQ ID NO: 9928 - RNA, 20 nt, Artificial Sequence
  SAMD9L targeting guide sequence portion
ucaaacccacagauccacac

SEQ ID NO: 9929 - RNA, 20 nt, Artificial Sequence
  SAMD9L targeting guide sequence portion
ucaaauaauuaagaaguuuc

SEQ ID NO: 9930 - RNA, 20 nt, Artificial Sequence
  SAMD9L targeting guide sequence portion
ucaaauacguuuauuuauau

SEQ ID NO: 9931 - RNA, 20 nt, Artificial Sequence
  SAMD9L targeting guide sequence portion
ucaaucuuuuaauguuuuaa

SEQ ID NO: 9932 - RNA, 20 nt, Artificial Sequence
  SAMD9L targeting guide sequence portion
ucaaugaaacuucuuaauua

SEQ ID NO: 9933 - RNA, 20 nt, Artificial Sequence
  SAMD9L targeting guide sequence portion
ucaauugcuuuuauaaguuu

SEQ ID NO: 9934 - RNA, 20 nt, Artificial Sequence
  SAMD9L targeting guide sequence portion
ucacagugaagaaauaauuu

SEQ ID NO: 9935 - RNA, 20 nt, Artificial Sequence
  SAMD9L targeting guide sequence portion
ucacaucauaacugucuaua

SEQ ID NO: 9936 - RNA, 20 nt, Artificial Sequence
  SAMD9L targeting guide sequence portion
ucacugugacagcaaagauu

SEQ ID NO: 9937 - RNA, 20 nt, Artificial Sequence
  SAMD9L targeting guide sequence portion
ucagacucaaauaauuaaga

SEQ ID NO: 9938 - RNA, 20 nt, Artificial Sequence
  SAMD9L targeting guide sequence portion
ucagggaggcaaaagcaaaa

SEQ ID NO: 9939 - RNA, 20 nt, Artificial Sequence
  SAMD9L targeting guide sequence portion
ucauaaagauauaaauaaac

SEQ ID NO: 9940 - RNA, 20 nt, Artificial Sequence
  SAMD9L targeting guide sequence portion
ucauaacauuauggcuaacc

SEQ ID NO: 9941 - RNA, 20 nt, Artificial Sequence
  SAMD9L targeting guide sequence portion
ucauaacugucuauagggca

SEQ ID NO: 9942 - RNA, 20 nt, Artificial Sequence
  SAMD9L targeting guide sequence portion
ucauaucuuaaaaaggcuug

SEQ ID NO: 9943 - RNA, 20 nt, Artificial Sequence
  SAMD9L targeting guide sequence portion
ucaucuuauuuaaaucuuug

SEQ ID NO: 9944 - RNA, 20 nt, Artificial Sequence
  SAMD9L targeting guide sequence portion
ucauggcacuuucauaacau

SEQ ID NO: 9945 - RNA, 20 nt, Artificial Sequence
  SAMD9L targeting guide sequence portion
ucauucagggaggcaaaagc

SEQ ID NO: 9946 - RNA, 20 nt, Artificial Sequence
  SAMD9L targeting guide sequence portion
ucauugauauccacugguca

SEQ ID NO: 9947 - RNA, 20 nt, Artificial Sequence
  SAMD9L targeting guide sequence portion
uccaauaagcuuucucuuuu

SEQ ID NO: 9948 - RNA, 20 nt, Artificial Sequence
  SAMD9L targeting guide sequence portion
uccacaccagaguucuauuu

SEQ ID NO: 9949 - RNA, 20 nt, Artificial Sequence
  SAMD9L targeting guide sequence portion
uccacuggucacaucauaac

SEQ ID NO: 9950 - RNA, 20 nt, Artificial Sequence
  SAMD9L targeting guide sequence portion
uccacuuugugccaagcucu

SEQ ID NO: 9951 - RNA, 20 nt, Artificial Sequence
  SAMD9L targeting guide sequence portion
ucccugaaugaauuacaagc

SEQ ID NO: 9952 - RNA, 20 nt, Artificial Sequence
  SAMD9L targeting guide sequence portion
ucuaaauuauuucuucacug

SEQ ID NO: 9953 - RNA, 20 nt, Artificial Sequence
  SAMD9L targeting guide sequence portion
ucuaauuacagauuuugcuu

SEQ ID NO: 9954 - RNA, 20 nt, Artificial Sequence
  SAMD9L targeting guide sequence portion
ucuauagggcaauaaaaucu

SEQ ID NO: 9955 - RNA, 20 nt, Artificial Sequence
  SAMD9L targeting guide sequence portion
ucuauucucauggcacuuuc

SEQ ID NO: 9956 - RNA, 20 nt, Artificial Sequence
  SAMD9L targeting guide sequence portion
ucuauuuaccucaucuuggu

SEQ ID NO: 9957 - RNA, 20 nt, Artificial Sequence
  SAMD9L targeting guide sequence portion
ucucauggcacuuucauaac

SEQ ID NO: 9958 - RNA, 20 nt, Artificial Sequence
  SAMD9L targeting guide sequence portion
ucucuauucucauggcacuu

SEQ ID NO: 9959 - RNA, 20 nt, Artificial Sequence
  SAMD9L targeting guide sequence portion
ucucucuauucucauggcac

SEQ ID NO: 9960 - RNA, 20 nt, Artificial Sequence
  SAMD9L targeting guide sequence portion
ucucucucuauucucauggc

SEQ ID NO: 9961 - RNA, 20 nt, Artificial Sequence
  SAMD9L targeting guide sequence portion
ucucucucucuauucucaug

SEQ ID NO: 9962 - RNA, 20 nt, Artificial Sequence
  SAMD9L targeting guide sequence portion
ucucuuuuacauucaucuua

SEQ ID NO: 9963 - RNA, 20 nt, Artificial Sequence
  SAMD9L targeting guide sequence portion
ucugaaaaugcauauuuaaa

SEQ ID NO: 9964 - RNA, 20 nt, Artificial Sequence
  SAMD9L targeting guide sequence portion
ucugcggguaggcauauuuc

SEQ ID NO: 9965 - RNA, 20 nt, Artificial Sequence
  SAMD9L targeting guide sequence portion
ucugguguggaucugugggu

SEQ ID NO: 9966 - RNA, 20 nt, Artificial Sequence
  SAMD9L targeting guide sequence portion
ucuguaauuagagguuagcc

SEQ ID NO: 9967 - RNA, 20 nt, Artificial Sequence
  SAMD9L targeting guide sequence portion
ucuguggguuugaguccaau

SEQ ID NO: 9968 - RNA, 20 nt, Artificial Sequence
  SAMD9L targeting guide sequence portion
ucuguguuaaacucaauugc

SEQ ID NO: 9969 - RNA, 20 nt, Artificial Sequence
  SAMD9L targeting guide sequence portion
ucuuaaaaaggcuuguaauu

SEQ ID NO: 9970 - RNA, 20 nt, Artificial Sequence
  SAMD9L targeting guide sequence portion
ucuuaauuauuugagucuga

SEQ ID NO: 9971 - RNA, 20 nt, Artificial Sequence
  SAMD9L targeting guide sequence portion
ucuuauuuaaaucuuugcug

SEQ ID NO: 9972 - RNA, 20 nt, Artificial Sequence
  SAMD9L targeting guide sequence portion
ucuucacugugacagcaaag

SEQ ID NO: 9973 - RNA, 20 nt, Artificial Sequence
  SAMD9L targeting guide sequence portion
ucuuuaugauuuuauucucu

SEQ ID NO: 9974 - RNA, 20 nt, Artificial Sequence
  SAMD9L targeting guide sequence portion
ucuuugcugucacagugaag

SEQ ID NO: 9975 - RNA, 20 nt, Artificial Sequence
  SAMD9L targeting guide sequence portion
ucuuuuaauguuuuaaauau

SEQ ID NO: 9976 - RNA, 20 nt, Artificial Sequence
  SAMD9L targeting guide sequence portion
ucuuuuacauucaucuuauu

SEQ ID NO: 9977 - RNA, 20 nt, Artificial Sequence
  SAMD9L targeting guide sequence portion
ugaaaaugcauauuuaaaac

SEQ ID NO: 9978 - RNA, 20 nt, Artificial Sequence
  SAMD9L targeting guide sequence portion
ugaaacuucuuaauuauuug

SEQ ID NO: 9979 - RNA, 20 nt, Artificial Sequence
  SAMD9L targeting guide sequence portion
ugaaagugccaugagaauag

SEQ ID NO: 9980 - RNA, 20 nt, Artificial Sequence
  SAMD9L targeting guide sequence portion
ugaaauaugccuacccgcag

SEQ ID NO: 9981 - RNA, 20 nt, Artificial Sequence
  SAMD9L targeting guide sequence portion
ugaagaaauaauuuagaaaa

SEQ ID NO: 9982 - RNA, 20 nt, Artificial Sequence
  SAMD9L targeting guide sequence portion
ugaaugaauuacaagccuuu

SEQ ID NO: 9983 - RNA, 20 nt, Artificial Sequence
  SAMD9L targeting guide sequence portion
ugaauguaaaagagaaagcu

SEQ ID NO: 9984 - RNA, 20 nt, Artificial Sequence
  SAMD9L targeting guide sequence portion
ugaauuacaagccuuuuuaa

SEQ ID NO: 9985 - RNA, 20 nt, Artificial Sequence
  SAMD9L targeting guide sequence portion
ugacagcaaagauuuaaaua

SEQ ID NO: 9986 - RNA, 20 nt, Artificial Sequence
  SAMD9L targeting guide sequence portion
ugaccaguggauaucaauga

SEQ ID NO: 9987 - RNA, 20 nt, Artificial Sequence
  SAMD9L targeting guide sequence portion
ugacuccacuuugugccaag

SEQ ID NO: 9988 - RNA, 20 nt, Artificial Sequence
  SAMD9L targeting guide sequence portion
ugagaauagagagagagaau

SEQ ID NO: 9989 - RNA, 20 nt, Artificial Sequence
  SAMD9L targeting guide sequence portion
ugagguaaauagaacucugg

SEQ ID NO: 9990 - RNA, 20 nt, Artificial Sequence
  SAMD9L targeting guide sequence portion
ugaguccaauaagcuuucuc

SEQ ID NO: 9991 - RNA, 20 nt, Artificial Sequence
  SAMD9L targeting guide sequence portion
ugagucugaaaaugcauauu

SEQ ID NO: 9992 - RNA, 20 nt, Artificial Sequence
  SAMD9L targeting guide sequence portion
ugaguuuaacacagauuuua

SEQ ID NO: 9993 - RNA, 20 nt, Artificial Sequence
  SAMD9L targeting guide sequence portion
ugauaccaagaugagguaaa

SEQ ID NO: 9994 - RNA, 20 nt, Artificial Sequence
  SAMD9L targeting guide sequence portion
ugauauccacuggucacauc

SEQ ID NO: 9995 - RNA, 20 nt, Artificial Sequence
  SAMD9L targeting guide sequence portion
ugaugugaccaguggauauc

SEQ ID NO: 9996 - RNA, 20 nt, Artificial Sequence
  SAMD9L targeting guide sequence portion
ugauuuuauucucucucucu

SEQ ID NO: 9997 - RNA, 20 nt, Artificial Sequence
  SAMD9L targeting guide sequence portion
ugcauauuuaaaacauuaaa

SEQ ID NO: 9998 - RNA, 20 nt, Artificial Sequence
  SAMD9L targeting guide sequence portion
ugcauuuucagacucaaaua

SEQ ID NO: 9999 - RNA, 20 nt, Artificial Sequence
  SAMD9L targeting guide sequence portion
ugccaagcucugcggguagg

SEQ ID NO: 10000 - RNA, 20 nt, Artificial Sequence
  SAMD9L targeting guide sequence portion
ugccaugagaauagagagag

SEQ ID NO: 10001 - RNA, 20 nt, Artificial Sequence
  SAMD9L targeting guide sequence portion
ugcccuauagacaguuauga

SEQ ID NO: 10002 - RNA, 20 nt, Artificial Sequence
  SAMD9L targeting guide sequence portion
ugccuacccgcagagcuugg

SEQ ID NO: 10003 - RNA, 20 nt, Artificial Sequence
  SAMD9L targeting guide sequence portion
ugccucccugaaugaauuac

SEQ ID NO: 10004 - RNA, 20 nt, Artificial Sequence
  SAMD9L targeting guide sequence portion
ugcggguaggcauauuucau

SEQ ID NO: 10005 - RNA, 20 nt, Artificial Sequence
  SAMD9L targeting guide sequence portion
ugcugucacagugaagaaau

SEQ ID NO: 10006 - RNA, 20 nt, Artificial Sequence
  SAMD9L targeting guide sequence portion
ugcuuuuauaaguuuucuaa

SEQ ID NO: 10007 - RNA, 20 nt, Artificial Sequence
  SAMD9L targeting guide sequence portion
ugcuuuugccucccugaaug

SEQ ID NO: 10008 - RNA, 20 nt, Artificial Sequence
  SAMD9L targeting guide sequence portion
uggaagguaaauauauuguu

SEQ ID NO: 10009 - RNA, 20 nt, Artificial Sequence
  SAMD9L targeting guide sequence portion
uggacucaaacccacagauc

SEQ ID NO: 10010 - RNA, 20 nt, Artificial Sequence
  SAMD9L targeting guide sequence portion
uggagucaaucuuuuaaugu

SEQ ID NO: 10011 - RNA, 20 nt, Artificial Sequence
  SAMD9L targeting guide sequence portion
uggauaucaaugaaacuucu

SEQ ID NO: 10012 - RNA, 20 nt, Artificial Sequence
  SAMD9L targeting guide sequence portion
uggaucuguggguuugaguc

SEQ ID NO: 10013 - RNA, 20 nt, Artificial Sequence
  SAMD9L targeting guide sequence portion
uggauggggaacaauauauu

SEQ ID NO: 10014 - RNA, 20 nt, Artificial Sequence
  SAMD9L targeting guide sequence portion
uggcacaaaguggagucaau

SEQ ID NO: 10015 - RNA, 20 nt, Artificial Sequence
  SAMD9L targeting guide sequence portion
uggcacuuucauaacauuau

SEQ ID NO: 10016 - RNA, 20 nt, Artificial Sequence
  SAMD9L targeting guide sequence portion
uggcuaaccucuaauuacag

SEQ ID NO: 10017 - RNA, 20 nt, Artificial Sequence
  SAMD9L targeting guide sequence portion
uggggaacaauauauuuacc

SEQ ID NO: 10018 - RNA, 20 nt, Artificial Sequence
  SAMD9L targeting guide sequence portion
uggguuugaguccaauaagc

SEQ ID NO: 10019 - RNA, 20 nt, Artificial Sequence
  SAMD9L targeting guide sequence portion
uggucacaucauaacugucu

SEQ ID NO: 10020 - RNA, 20 nt, Artificial Sequence
  SAMD9L targeting guide sequence portion
ugguggauggggaacaauau

SEQ ID NO: 10021 - RNA, 20 nt, Artificial Sequence
  SAMD9L targeting guide sequence portion
ugguguggaucuguggguuu

SEQ ID NO: 10022 - RNA, 20 nt, Artificial Sequence
  SAMD9L targeting guide sequence portion
uguaaaagagaaagcuuauu

SEQ ID NO: 10023 - RNA, 20 nt, Artificial Sequence
  SAMD9L targeting guide sequence portion
uguaauuagagguuagccau

SEQ ID NO: 10024 - RNA, 20 nt, Artificial Sequence
  SAMD9L targeting guide sequence portion
uguaauucauucagggaggc

SEQ ID NO: 10025 - RNA, 20 nt, Artificial Sequence
  SAMD9L targeting guide sequence portion
ugucacagugaagaaauaau

SEQ ID NO: 10026 - RNA, 20 nt, Artificial Sequence
  SAMD9L targeting guide sequence portion
ugucuauagggcaauaaaau

SEQ ID NO: 10027 - RNA, 20 nt, Artificial Sequence
  SAMD9L targeting guide sequence portion
ugugacagcaaagauuuaaa

SEQ ID NO: 10028 - RNA, 20 nt, Artificial Sequence
  SAMD9L targeting guide sequence portion
ugugaccaguggauaucaau

SEQ ID NO: 10029 - RNA, 20 nt, Artificial Sequence
  SAMD9L targeting guide sequence portion
ugugccaagcucugcgggua

SEQ ID NO: 10030 - RNA, 20 nt, Artificial Sequence
  SAMD9L targeting guide sequence portion
uguggaagguaaauauauug

SEQ ID NO: 10031 - RNA, 20 nt, Artificial Sequence
  SAMD9L targeting guide sequence portion
uguggaucuguggguuugag

SEQ ID NO: 10032 - RNA, 20 nt, Artificial Sequence
  SAMD9L targeting guide sequence portion
uguggguuugaguccaauaa

SEQ ID NO: 10033 - RNA, 20 nt, Artificial Sequence
  SAMD9L targeting guide sequence portion
ugugguggauggggaacaau

SEQ ID NO: 10034 - RNA, 20 nt, Artificial Sequence
  SAMD9L targeting guide sequence portion
uguguuaaacucaauugcuu

SEQ ID NO: 10035 - RNA, 20 nt, Artificial Sequence
  SAMD9L targeting guide sequence portion
uguuaaacucaauugcuuuu

SEQ ID NO: 10036 - RNA, 20 nt, Artificial Sequence
  SAMD9L targeting guide sequence portion
uguuaugaaagugccaugag

SEQ ID NO: 10037 - RNA, 20 nt, Artificial Sequence
  SAMD9L targeting guide sequence portion
uguuuuaaauaugcauuuuc

SEQ ID NO: 10038 - RNA, 20 nt, Artificial Sequence
  SAMD9L targeting guide sequence portion
uuaaaaaggcuuguaauuca

SEQ ID NO: 10039 - RNA, 20 nt, Artificial Sequence
  SAMD9L targeting guide sequence portion
uuaaaacauuaaaagauuga

SEQ ID NO: 10040 - RNA, 20 nt, Artificial Sequence
  SAMD9L targeting guide sequence portion
uuaaaagauugacuccacuu

SEQ ID NO: 10041 - RNA, 20 nt, Artificial Sequence
  SAMD9L targeting guide sequence portion
uuaaacucaauugcuuuuau

SEQ ID NO: 10042 - RNA, 20 nt, Artificial Sequence
  SAMD9L targeting guide sequence portion
uuaaauaagaugaauguaaa

SEQ ID NO: 10043 - RNA, 20 nt, Artificial Sequence
  SAMD9L targeting guide sequence portion
uuaaauaugcauuuucagac

SEQ ID NO: 10044 - RNA, 20 nt, Artificial Sequence
  SAMD9L targeting guide sequence portion
uuaaaucuuugcugucacag

SEQ ID NO: 10045 - RNA, 20 nt, Artificial Sequence
  SAMD9L targeting guide sequence portion
uuaacacagauuuuauugcc

SEQ ID NO: 10046 - RNA, 20 nt, Artificial Sequence
  SAMD9L targeting guide sequence portion
uuaagaaguuucauugauau

SEQ ID NO: 10047 - RNA, 20 nt, Artificial Sequence
  SAMD9L targeting guide sequence portion
uuaagauaugaaauaugccu

SEQ ID NO: 10048 - RNA, 20 nt, Artificial Sequence
  SAMD9L targeting guide sequence portion
uuaauguuuuaaauaugcau

SEQ ID NO: 10049 - RNA, 20 nt, Artificial Sequence
  SAMD9L targeting guide sequence portion
uuaauuauuugagucugaaa

SEQ ID NO: 10050 - RNA, 20 nt, Artificial Sequence
  SAMD9L targeting guide sequence portion
uuacaagccuuuuuaagaua

SEQ ID NO: 10051 - RNA, 20 nt, Artificial Sequence
  SAMD9L targeting guide sequence portion
uuacagauuuugcuuuugcc

SEQ ID NO: 10052 - RNA, 20 nt, Artificial Sequence
  SAMD9L targeting guide sequence portion
uuacauucaucuuauuuaaa

SEQ ID NO: 10053 - RNA, 20 nt, Artificial Sequence
  SAMD9L targeting guide sequence portion
uuaccucaucuugguaucaa

SEQ ID NO: 10054 - RNA, 20 nt, Artificial Sequence
  SAMD9L targeting guide sequence portion
uuagaaaacuuauaaaagca

SEQ ID NO: 10055 - RNA, 20 nt, Artificial Sequence
  SAMD9L targeting guide sequence portion
uuagagguuagccauaaugu

SEQ ID NO: 10056 - RNA, 20 nt, Artificial Sequence
  SAMD9L targeting guide sequence portion
uuagccauaauguuaugaaa

SEQ ID NO: 10057 - RNA, 20 nt, Artificial Sequence
  SAMD9L targeting guide sequence portion
uuauaaaagcaauugaguuu

SEQ ID NO: 10058 - RNA, 20 nt, Artificial Sequence
  SAMD9L targeting guide sequence portion
uuauaaguuuucuaaauuau

SEQ ID NO: 10059 - RNA, 20 nt, Artificial Sequence
  SAMD9L targeting guide sequence portion
uuauaucuuuaugauuuuau

SEQ ID NO: 10060 - RNA, 20 nt, Artificial Sequence
  SAMD9L targeting guide sequence portion
uuaugaaagugccaugagaa

SEQ ID NO: 10061 - RNA, 20 nt, Artificial Sequence
  SAMD9L targeting guide sequence portion
uuaugaugugaccaguggau

SEQ ID NO: 10062 - RNA, 20 nt, Artificial Sequence
  SAMD9L targeting guide sequence portion
uuaugauuuuauucucucuc

SEQ ID NO: 10063 - RNA, 20 nt, Artificial Sequence
  SAMD9L targeting guide sequence portion
uuauggcuaaccucuaauua

SEQ ID NO: 10064 - RNA, 20 nt, Artificial Sequence
  SAMD9L targeting guide sequence portion
uuauucucucucucuauucu

SEQ ID NO: 10065 - RNA, 20 nt, Artificial Sequence
  SAMD9L targeting guide sequence portion
uuauugauaccaagaugagg

SEQ ID NO: 10066 - RNA, 20 nt, Artificial Sequence
  SAMD9L targeting guide sequence portion
uuauugcccuauagacaguu

SEQ ID NO: 10067 - RNA, 20 nt, Artificial Sequence
  SAMD9L targeting guide sequence portion
uuauuggacucaaacccaca

SEQ ID NO: 10068 - RNA, 20 nt, Artificial Sequence
  SAMD9L targeting guide sequence portion
uuauuuaaaucuuugcuguc

SEQ ID NO: 10069 - RNA, 20 nt, Artificial Sequence
  SAMD9L targeting guide sequence portion
uuauuuauaucuuuaugauu

SEQ ID NO: 10070 - RNA, 20 nt, Artificial Sequence
  SAMD9L targeting guide sequence portion
uuauuucuucacugugacag

SEQ ID NO: 10071 - RNA, 20 nt, Artificial Sequence
  SAMD9L targeting guide sequence portion
uuauuugagucugaaaaugc

SEQ ID NO: 10072 - RNA, 20 nt, Artificial Sequence
  SAMD9L targeting guide sequence portion
uucaaauacguuuauuuaua

SEQ ID NO: 10073 - RNA, 20 nt, Artificial Sequence
  SAMD9L targeting guide sequence portion
uucacugugacagcaaagau

SEQ ID NO: 10074 - RNA, 20 nt, Artificial Sequence
  SAMD9L targeting guide sequence portion
uucagacucaaauaauuaag

SEQ ID NO: 10075 - RNA, 20 nt, Artificial Sequence
  SAMD9L targeting guide sequence portion
uucagggaggcaaaagcaaa

SEQ ID NO: 10076 - RNA, 20 nt, Artificial Sequence
  SAMD9L targeting guide sequence portion
uucauaacauuauggcuaac

SEQ ID NO: 10077 - RNA, 20 nt, Artificial Sequence
  SAMD9L targeting guide sequence portion
uucauaucuuaaaaaggcuu

SEQ ID NO: 10078 - RNA, 20 nt, Artificial Sequence
  SAMD9L targeting guide sequence portion
uucaucuuauuuaaaucuuu

SEQ ID NO: 10079 - RNA, 20 nt, Artificial Sequence
  SAMD9L targeting guide sequence portion
uucauucagggaggcaaaag

SEQ ID NO: 10080 - RNA, 20 nt, Artificial Sequence
  SAMD9L targeting guide sequence portion
uucauugauauccacugguc

SEQ ID NO: 10081 - RNA, 20 nt, Artificial Sequence
  SAMD9L targeting guide sequence portion
uucuaaauuauuucuucacu

SEQ ID NO: 10082 - RNA, 20 nt, Artificial Sequence
  SAMD9L targeting guide sequence portion
uucuauuuaccucaucuugg

SEQ ID NO: 10083 - RNA, 20 nt, Artificial Sequence
  SAMD9L targeting guide sequence portion
uucucauggcacuuucauaa

SEQ ID NO: 10084 - RNA, 20 nt, Artificial Sequence
  SAMD9L targeting guide sequence portion
uucucucucucuauucucau

SEQ ID NO: 10085 - RNA, 20 nt, Artificial Sequence
  SAMD9L targeting guide sequence portion
uucucuuuuacauucaucuu

SEQ ID NO: 10086 - RNA, 20 nt, Artificial Sequence
  SAMD9L targeting guide sequence portion
uucuuaauuauuugagucug

SEQ ID NO: 10087 - RNA, 20 nt, Artificial Sequence
  SAMD9L targeting guide sequence portion
uucuucacugugacagcaaa

SEQ ID NO: 10088 - RNA, 20 nt, Artificial Sequence
  SAMD9L targeting guide sequence portion
uugacuccacuuugugccaa

SEQ ID NO: 10089 - RNA, 20 nt, Artificial Sequence
  SAMD9L targeting guide sequence portion
uugaguccaauaagcuuucu

SEQ ID NO: 10090 - RNA, 20 nt, Artificial Sequence
  SAMD9L targeting guide sequence portion
uugagucugaaaaugcauau

SEQ ID NO: 10091 - RNA, 20 nt, Artificial Sequence
  SAMD9L targeting guide sequence portion
uugaguuuaacacagauuuu

SEQ ID NO: 10092 - RNA, 20 nt, Artificial Sequence
  SAMD9L targeting guide sequence portion
uugauaccaagaugagguaa

SEQ ID NO: 10093 - RNA, 20 nt, Artificial Sequence
  SAMD9L targeting guide sequence portion
uugauauccacuggucacau

SEQ ID NO: 10094 - RNA, 20 nt, Artificial Sequence
  SAMD9L targeting guide sequence portion
uugcccuauagacaguuaug

SEQ ID NO: 10095 - RNA, 20 nt, Artificial Sequence
  SAMD9L targeting guide sequence portion
uugccucccugaaugaauua

SEQ ID NO: 10096 - RNA, 20 nt, Artificial Sequence
  SAMD9L targeting guide sequence portion
uugcugucacagugaagaaa

SEQ ID NO: 10097 - RNA, 20 nt, Artificial Sequence
  SAMD9L targeting guide sequence portion
uugcuuuuauaaguuuucua

SEQ ID NO: 10098 - RNA, 20 nt, Artificial Sequence
  SAMD9L targeting guide sequence portion
uugcuuuugccucccugaau

SEQ ID NO: 10099 - RNA, 20 nt, Artificial Sequence
  SAMD9L targeting guide sequence portion
uuggacucaaacccacagau

SEQ ID NO: 10100 - RNA, 20 nt, Artificial Sequence
  SAMD9L targeting guide sequence portion
uuggcacaaaguggagucaa

SEQ ID NO: 10101 - RNA, 20 nt, Artificial Sequence
  SAMD9L targeting guide sequence portion
uuguaauucauucagggagg

SEQ ID NO: 10102 - RNA, 20 nt, Artificial Sequence
  SAMD9L targeting guide sequence portion
uugugccaagcucugcgggu

SEQ ID NO: 10103 - RNA, 20 nt, Artificial Sequence
  SAMD9L targeting guide sequence portion
uuuaaaacauuaaaagauug

SEQ ID NO: 10104 - RNA, 20 nt, Artificial Sequence
  SAMD9L targeting guide sequence portion
uuuaaauaagaugaauguaa

SEQ ID NO: 10105 - RNA, 20 nt, Artificial Sequence
  SAMD9L targeting guide sequence portion
uuuaaauaugcauuuucaga

SEQ ID NO: 10106 - RNA, 20 nt, Artificial Sequence
  SAMD9L targeting guide sequence portion
uuuaaaucuuugcugucaca

SEQ ID NO: 10107 - RNA, 20 nt, Artificial Sequence
  SAMD9L targeting guide sequence portion
uuuaacacagauuuuauugc

SEQ ID NO: 10108 - RNA, 20 nt, Artificial Sequence
  SAMD9L targeting guide sequence portion
uuuaagauaugaaauaugcc

SEQ ID NO: 10109 - RNA, 20 nt, Artificial Sequence
  SAMD9L targeting guide sequence portion
uuuaauguuuuaaauaugca

SEQ ID NO: 10110 - RNA, 20 nt, Artificial Sequence
  SAMD9L targeting guide sequence portion
uuuacauucaucuuauuuaa

SEQ ID NO: 10111 - RNA, 20 nt, Artificial Sequence
  SAMD9L targeting guide sequence portion
uuuaccucaucuugguauca

SEQ ID NO: 10112 - RNA, 20 nt, Artificial Sequence
  SAMD9L targeting guide sequence portion
uuuagaaaacuuauaaaagc

SEQ ID NO: 10113 - RNA, 20 nt, Artificial Sequence
  SAMD9L targeting guide sequence portion
uuuauaaguuuucuaaauua

SEQ ID NO: 10114 - RNA, 20 nt, Artificial Sequence
  SAMD9L targeting guide sequence portion
uuuauaucuuuaugauuuua

SEQ ID NO: 10115 - RNA, 20 nt, Artificial Sequence
  SAMD9L targeting guide sequence portion
uuuaugauuuuauucucucu

SEQ ID NO: 10116 - RNA, 20 nt, Artificial Sequence
  SAMD9L targeting guide sequence portion
uuuauucucucucucuauuc

SEQ ID NO: 10117 - RNA, 20 nt, Artificial Sequence
  SAMD9L targeting guide sequence portion
uuuauugauaccaagaugag

SEQ ID NO: 10118 - RNA, 20 nt, Artificial Sequence
  SAMD9L targeting guide sequence portion
uuuauugcccuauagacagu

SEQ ID NO: 10119 - RNA, 20 nt, Artificial Sequence
  SAMD9L targeting guide sequence portion
uuuauuuauaucuuuaugau

SEQ ID NO: 10120 - RNA, 20 nt, Artificial Sequence
  SAMD9L targeting guide sequence portion
uuucagacucaaauaauuaa

SEQ ID NO: 10121 - RNA, 20 nt, Artificial Sequence
  SAMD9L targeting guide sequence portion
uuucauaacauuauggcuaa

SEQ ID NO: 10122 - RNA, 20 nt, Artificial Sequence
  SAMD9L targeting guide sequence portion
uuucauaucuuaaaaaggcu

SEQ ID NO: 10123 - RNA, 20 nt, Artificial Sequence
  SAMD9L targeting guide sequence portion
uuucauugauauccacuggu

SEQ ID NO: 10124 - RNA, 20 nt, Artificial Sequence
  SAMD9L targeting guide sequence portion
uuucuaaauuauuucuucac

SEQ ID NO: 10125 - RNA, 20 nt, Artificial Sequence
  SAMD9L targeting guide sequence portion
uuucucuuuuacauucaucu

SEQ ID NO: 10126 - RNA, 20 nt, Artificial Sequence
  SAMD9L targeting guide sequence portion
uuucuucacugugacagcaa

SEQ ID NO: 10127 - RNA, 20 nt, Artificial Sequence
  SAMD9L targeting guide sequence portion
uuugaguccaauaagcuuuc

SEQ ID NO: 10128 - RNA, 20 nt, Artificial Sequence
  SAMD9L targeting guide sequence portion
uuugagucugaaaaugcaua

SEQ ID NO: 10129 - RNA, 20 nt, Artificial Sequence
  SAMD9L targeting guide sequence portion
uuugccucccugaaugaauu

SEQ ID NO: 10130 - RNA, 20 nt, Artificial Sequence
  SAMD9L targeting guide sequence portion
uuugcugucacagugaagaa

SEQ ID NO: 10131 - RNA, 20 nt, Artificial Sequence
  SAMD9L targeting guide sequence portion
uuugcuuuugccucccugaa

SEQ ID NO: 10132 - RNA, 20 nt, Artificial Sequence
  SAMD9L targeting guide sequence portion
uuugugccaagcucugcggg

SEQ ID NO: 10133 - RNA, 20 nt, Artificial Sequence
  SAMD9L targeting guide sequence portion
uuuuaaauaugcauuuucag

SEQ ID NO: 10134 - RNA, 20 nt, Artificial Sequence
  SAMD9L targeting guide sequence portion
uuuuaagauaugaaauaugc

SEQ ID NO: 10135 - RNA, 20 nt, Artificial Sequence
  SAMD9L targeting guide sequence portion
uuuuaauguuuuaaauaugc

SEQ ID NO: 10136 - RNA, 20 nt, Artificial Sequence
  SAMD9L targeting guide sequence portion
uuuuacauucaucuuauuua

SEQ ID NO: 10137 - RNA, 20 nt, Artificial Sequence
  SAMD9L targeting guide sequence portion
uuuuauaaguuuucuaaauu

SEQ ID NO: 10138 - RNA, 20 nt, Artificial Sequence
  SAMD9L targeting guide sequence portion
uuuuauucucucucucuauu

SEQ ID NO: 10139 - RNA, 20 nt, Artificial Sequence
  SAMD9L targeting guide sequence portion
uuuuauugauaccaagauga

SEQ ID NO: 10140 - RNA, 20 nt, Artificial Sequence
  SAMD9L targeting guide sequence portion
uuuuauugcccuauagacag

SEQ ID NO: 10141 - RNA, 20 nt, Artificial Sequence
  SAMD9L targeting guide sequence portion
uuuucagacucaaauaauua

SEQ ID NO: 10142 - RNA, 20 nt, Artificial Sequence
  SAMD9L targeting guide sequence portion
uuuucuaaauuauuucuuca

SEQ ID NO: 10143 - RNA, 20 nt, Artificial Sequence
  SAMD9L targeting guide sequence portion
uuuugccucccugaaugaau

SEQ ID NO: 10144 - RNA, 20 nt, Artificial Sequence
  SAMD9L targeting guide sequence portion
uuuugcuuuugccucccuga

SEQ ID NO: 10145 - RNA, 20 nt, Artificial Sequence
  SAMD9L targeting guide sequence portion
uuuuuaagauaugaaauaug

SEQ ID NO: 10146 - RNA, 20 nt, Artificial Sequence
  SAMD9L targeting guide sequence portion
uuuuuauugauaccaagaug

SEQ ID NO: 10147 - RNA, 21 nt, Artificial Sequence
  SAMD9L targeting guide sequence portion
aaaaaggcuuguaauucauuc

SEQ ID NO: 10148 - RNA, 21 nt, Artificial Sequence
  SAMD9L targeting guide sequence portion
aaaacauuaaaagauugacuc

SEQ ID NO: 10149 - RNA, 21 nt, Artificial Sequence
  SAMD9L targeting guide sequence portion
aaaacuuauaaaagcaauuga

SEQ ID NO: 10150 - RNA, 21 nt, Artificial Sequence
  SAMD9L targeting guide sequence portion
aaaagagaaagcuuauuggac

SEQ ID NO: 10151 - RNA, 21 nt, Artificial Sequence
  SAMD9L targeting guide sequence portion
aaaagauugacuccacuuugu

SEQ ID NO: 10152 - RNA, 21 nt, Artificial Sequence
  SAMD9L targeting guide sequence portion
aaaagcaaaaucuguaauuag

SEQ ID NO: 10153 - RNA, 21 nt, Artificial Sequence
  SAMD9L targeting guide sequence portion
aaaagcaauugaguuuaacac

SEQ ID NO: 10154 - RNA, 21 nt, Artificial Sequence
  SAMD9L targeting guide sequence portion
aaaaggcuuguaauucauuca

SEQ ID NO: 10155 - RNA, 21 nt, Artificial Sequence
  SAMD9L targeting guide sequence portion
aaaaucauaaagauauaaaua

SEQ ID NO: 10156 - RNA, 21 nt, Artificial Sequence
  SAMD9L targeting guide sequence portion
aaaaucuguaauuagagguua

SEQ ID NO: 10157 - RNA, 21 nt, Artificial Sequence
  SAMD9L targeting guide sequence portion
aaaaucuguguuaaacucaau

SEQ ID NO: 10158 - RNA, 21 nt, Artificial Sequence
  SAMD9L targeting guide sequence portion
aaaaugcauauuuaaaacauu

SEQ ID NO: 10159 - RNA, 21 nt, Artificial Sequence
  SAMD9L targeting guide sequence portion
aaacauuaaaagauugacucc

SEQ ID NO: 10160 - RNA, 21 nt, Artificial Sequence
  SAMD9L targeting guide sequence portion
aaacccacagauccacaccag

SEQ ID NO: 10161 - RNA, 21 nt, Artificial Sequence
  SAMD9L targeting guide sequence portion
aaacucaauugcuuuuauaag

SEQ ID NO: 10162 - RNA, 21 nt, Artificial Sequence
  SAMD9L targeting guide sequence portion
aaacuuauaaaagcaauugag

SEQ ID NO: 10163 - RNA, 21 nt, Artificial Sequence
  SAMD9L targeting guide sequence portion
aaacuucuuaauuauuugagu

SEQ ID NO: 10164 - RNA, 21 nt, Artificial Sequence
  SAMD9L targeting guide sequence portion
aaagagaaagcuuauuggacu

SEQ ID NO: 10165 - RNA, 21 nt, Artificial Sequence
  SAMD9L targeting guide sequence portion
aaagauauaaauaaacguauu

SEQ ID NO: 10166 - RNA, 21 nt, Artificial Sequence
  SAMD9L targeting guide sequence portion
aaagauugacuccacuuugug

SEQ ID NO: 10167 - RNA, 21 nt, Artificial Sequence
  SAMD9L targeting guide sequence portion
aaagauuuaaauaagaugaau

SEQ ID NO: 10168 - RNA, 21 nt, Artificial Sequence
  SAMD9L targeting guide sequence portion
aaagcaaaaucuguaauuaga

SEQ ID NO: 10169 - RNA, 21 nt, Artificial Sequence
  SAMD9L targeting guide sequence portion
aaagcaauugaguuuaacaca

SEQ ID NO: 10170 - RNA, 21 nt, Artificial Sequence
  SAMD9L targeting guide sequence portion
aaagcuuauuggacucaaacc

SEQ ID NO: 10171 - RNA, 21 nt, Artificial Sequence
  SAMD9L targeting guide sequence portion
aaaggcuuguaauucauucag

SEQ ID NO: 10172 - RNA, 21 nt, Artificial Sequence
  SAMD9L targeting guide sequence portion
aaagugccaugagaauagaga

SEQ ID NO: 10173 - RNA, 21 nt, Artificial Sequence
  SAMD9L targeting guide sequence portion
aaaguggagucaaucuuuuaa

SEQ ID NO: 10174 - RNA, 21 nt, Artificial Sequence
  SAMD9L targeting guide sequence portion
aaauaagaugaauguaaaaga

SEQ ID NO: 10175 - RNA, 21 nt, Artificial Sequence
  SAMD9L targeting guide sequence portion
aaauaauuaagaaguuucauu

SEQ ID NO: 10176 - RNA, 21 nt, Artificial Sequence
  SAMD9L targeting guide sequence portion
aaauaauuuagaaaacuuaua

SEQ ID NO: 10177 - RNA, 21 nt, Artificial Sequence
  SAMD9L targeting guide sequence portion
aaauacguuuauuuauaucuu

SEQ ID NO: 10178 - RNA, 21 nt, Artificial Sequence
  SAMD9L targeting guide sequence portion
aaauagaacucugguguggau

SEQ ID NO: 10179 - RNA, 21 nt, Artificial Sequence
  SAMD9L targeting guide sequence portion
aaauauauuguuccccaucca

SEQ ID NO: 10180 - RNA, 21 nt, Artificial Sequence
  SAMD9L targeting guide sequence portion
aaauaugcauuuucagacuca

SEQ ID NO: 10181 - RNA, 21 nt, Artificial Sequence
  SAMD9L targeting guide sequence portion
aaauaugccuacccgcagagc

SEQ ID NO: 10182 - RNA, 21 nt, Artificial Sequence
  SAMD9L targeting guide sequence portion
aaaucauaaagauauaaauaa

SEQ ID NO: 10183 - RNA, 21 nt, Artificial Sequence
  SAMD9L targeting guide sequence portion
aaaucuguaauuagagguuag

SEQ ID NO: 10184 - RNA, 21 nt, Artificial Sequence
  SAMD9L targeting guide sequence portion
aaaucuguguuaaacucaauu

SEQ ID NO: 10185 - RNA, 21 nt, Artificial Sequence
  SAMD9L targeting guide sequence portion
aaaucuuugcugucacaguga

SEQ ID NO: 10186 - RNA, 21 nt, Artificial Sequence
  SAMD9L targeting guide sequence portion
aaaugcauauuuaaaacauua

SEQ ID NO: 10187 - RNA, 21 nt, Artificial Sequence
  SAMD9L targeting guide sequence portion
aaauuauuucuucacugugac

SEQ ID NO: 10188 - RNA, 21 nt, Artificial Sequence
  SAMD9L targeting guide sequence portion
aacacagauuuuauugcccua

SEQ ID NO: 10189 - RNA, 21 nt, Artificial Sequence
  SAMD9L targeting guide sequence portion
aacauuaaaagauugacucca

SEQ ID NO: 10190 - RNA, 21 nt, Artificial Sequence
  SAMD9L targeting guide sequence portion
aacauuauggcuaaccucuaa

SEQ ID NO: 10191 - RNA, 21 nt, Artificial Sequence
  SAMD9L targeting guide sequence portion
aacccacagauccacaccaga

SEQ ID NO: 10192 - RNA, 21 nt, Artificial Sequence
  SAMD9L targeting guide sequence portion
aaccucuaauuacagauuuug

SEQ ID NO: 10193 - RNA, 21 nt, Artificial Sequence
  SAMD9L targeting guide sequence portion
aacucaauugcuuuuauaagu

SEQ ID NO: 10194 - RNA, 21 nt, Artificial Sequence
  SAMD9L targeting guide sequence portion
aacucugguguggaucugugg

SEQ ID NO: 10195 - RNA, 21 nt, Artificial Sequence
  SAMD9L targeting guide sequence portion
aacugucuauagggcaauaaa

SEQ ID NO: 10196 - RNA, 21 nt, Artificial Sequence
  SAMD9L targeting guide sequence portion
aacuuauaaaagcaauugagu

SEQ ID NO: 10197 - RNA, 21 nt, Artificial Sequence
  SAMD9L targeting guide sequence portion
aacuucuuaauuauuugaguc

SEQ ID NO: 10198 - RNA, 21 nt, Artificial Sequence
  SAMD9L targeting guide sequence portion
aagaaauaauuuagaaaacuu

SEQ ID NO: 10199 - RNA, 21 nt, Artificial Sequence
  SAMD9L targeting guide sequence portion
aagaaguuucauugauaucca

SEQ ID NO: 10200 - RNA, 21 nt, Artificial Sequence
  SAMD9L targeting guide sequence portion
aagagaaagcuuauuggacuc

SEQ ID NO: 10201 - RNA, 21 nt, Artificial Sequence
  SAMD9L targeting guide sequence portion
aagauauaaauaaacguauuu

SEQ ID NO: 10202 - RNA, 21 nt, Artificial Sequence
  SAMD9L targeting guide sequence portion
aagauaugaaauaugccuacc

SEQ ID NO: 10203 - RNA, 21 nt, Artificial Sequence
  SAMD9L targeting guide sequence portion
aagaugaauguaaaagagaaa

SEQ ID NO: 10204 - RNA, 21 nt, Artificial Sequence
  SAMD9L targeting guide sequence portion
aagaugagguaaauagaacuc

SEQ ID NO: 10205 - RNA, 21 nt, Artificial Sequence
  SAMD9L targeting guide sequence portion
aagauugacuccacuuugugc

SEQ ID NO: 10206 - RNA, 21 nt, Artificial Sequence
  SAMD9L targeting guide sequence portion
aagauuuaaauaagaugaaug

SEQ ID NO: 10207 - RNA, 21 nt, Artificial Sequence
  SAMD9L targeting guide sequence portion
aagcaaaaucuguaauuagag

SEQ ID NO: 10208 - RNA, 21 nt, Artificial Sequence
  SAMD9L targeting guide sequence portion
aagcaauugaguuuaacacag

SEQ ID NO: 10209 - RNA, 21 nt, Artificial Sequence
  SAMD9L targeting guide sequence portion
aagccuuuuuaagauaugaaa

SEQ ID NO: 10210 - RNA, 21 nt, Artificial Sequence
  SAMD9L targeting guide sequence portion
aagcucugcggguaggcauau

SEQ ID NO: 10211 - RNA, 21 nt, Artificial Sequence
  SAMD9L targeting guide sequence portion
aagcuuauuggacucaaaccc

SEQ ID NO: 10212 - RNA, 21 nt, Artificial Sequence
  SAMD9L targeting guide sequence portion
aagcuuucucuuuuacauuca

SEQ ID NO: 10213 - RNA, 21 nt, Artificial Sequence
  SAMD9L targeting guide sequence portion
aaggcuuguaauucauucagg

SEQ ID NO: 10214 - RNA, 21 nt, Artificial Sequence
  SAMD9L targeting guide sequence portion
aagguaaauauauuguucccc

SEQ ID NO: 10215 - RNA, 21 nt, Artificial Sequence
  SAMD9L targeting guide sequence portion
aagugccaugagaauagagag

SEQ ID NO: 10216 - RNA, 21 nt, Artificial Sequence
  SAMD9L targeting guide sequence portion
aaguggagucaaucuuuuaau

SEQ ID NO: 10217 - RNA, 21 nt, Artificial Sequence
  SAMD9L targeting guide sequence portion
aaguuucauugauauccacug

SEQ ID NO: 10218 - RNA, 21 nt, Artificial Sequence
  SAMD9L targeting guide sequence portion
aaguuuucuaaauuauuucuu

SEQ ID NO: 10219 - RNA, 21 nt, Artificial Sequence
  SAMD9L targeting guide sequence portion
aauaaaaucauaaagauauaa

SEQ ID NO: 10220 - RNA, 21 nt, Artificial Sequence
  SAMD9L targeting guide sequence portion
aauaaaaucuguguuaaacuc

SEQ ID NO: 10221 - RNA, 21 nt, Artificial Sequence
  SAMD9L targeting guide sequence portion
aauaagaugaauguaaaagag

SEQ ID NO: 10222 - RNA, 21 nt, Artificial Sequence
  SAMD9L targeting guide sequence portion
aauaagcuuucucuuuuacau

SEQ ID NO: 10223 - RNA, 21 nt, Artificial Sequence
  SAMD9L targeting guide sequence portion
aauaauuaagaaguuucauug

SEQ ID NO: 10224 - RNA, 21 nt, Artificial Sequence
  SAMD9L targeting guide sequence portion
aauaauuuagaaaacuuauaa

SEQ ID NO: 10225 - RNA, 21 nt, Artificial Sequence
  SAMD9L targeting guide sequence portion
aauacguuuauuuauaucuuu

SEQ ID NO: 10226 - RNA, 21 nt, Artificial Sequence
  SAMD9L targeting guide sequence portion
aauagaacucugguguggauc

SEQ ID NO: 10227 - RNA, 21 nt, Artificial Sequence
  SAMD9L targeting guide sequence portion
aauagagagagagaauaaaau

SEQ ID NO: 10228 - RNA, 21 nt, Artificial Sequence
  SAMD9L targeting guide sequence portion
aauauauuguuccccauccac

SEQ ID NO: 10229 - RNA, 21 nt, Artificial Sequence
  SAMD9L targeting guide sequence portion
aauaugcauuuucagacucaa

SEQ ID NO: 10230 - RNA, 21 nt, Artificial Sequence
  SAMD9L targeting guide sequence portion
aauaugccuacccgcagagcu

SEQ ID NO: 10231 - RNA, 21 nt, Artificial Sequence
  SAMD9L targeting guide sequence portion
aaucauaaagauauaaauaaa

SEQ ID NO: 10232 - RNA, 21 nt, Artificial Sequence
  SAMD9L targeting guide sequence portion
aaucuguaauuagagguuagc

SEQ ID NO: 10233 - RNA, 21 nt, Artificial Sequence
  SAMD9L targeting guide sequence portion
aaucuguguuaaacucaauug

SEQ ID NO: 10234 - RNA, 21 nt, Artificial Sequence
  SAMD9L targeting guide sequence portion
aaucuuugcugucacagugaa

SEQ ID NO: 10235 - RNA, 21 nt, Artificial Sequence
  SAMD9L targeting guide sequence portion
aaucuuuuaauguuuuaaaua

SEQ ID NO: 10236 - RNA, 21 nt, Artificial Sequence
  SAMD9L targeting guide sequence portion
aaugaaacuucuuaauuauuu

SEQ ID NO: 10237 - RNA, 21 nt, Artificial Sequence
  SAMD9L targeting guide sequence portion
aaugaauuacaagccuuuuua

SEQ ID NO: 10238 - RNA, 21 nt, Artificial Sequence
  SAMD9L targeting guide sequence portion
aaugcauauuuaaaacauuaa

SEQ ID NO: 10239 - RNA, 21 nt, Artificial Sequence
  SAMD9L targeting guide sequence portion
aauguaaaagagaaagcuuau

SEQ ID NO: 10240 - RNA, 21 nt, Artificial Sequence
  SAMD9L targeting guide sequence portion
aauguuaugaaagugccauga

SEQ ID NO: 10241 - RNA, 21 nt, Artificial Sequence
  SAMD9L targeting guide sequence portion
aauguuuuaaauaugcauuuu

SEQ ID NO: 10242 - RNA, 21 nt, Artificial Sequence
  SAMD9L targeting guide sequence portion
aauuaagaaguuucauugaua

SEQ ID NO: 10243 - RNA, 21 nt, Artificial Sequence
  SAMD9L targeting guide sequence portion
aauuacaagccuuuuuaagau

SEQ ID NO: 10244 - RNA, 21 nt, Artificial Sequence
  SAMD9L targeting guide sequence portion
aauuacagauuuugcuuuugc

SEQ ID NO: 10245 - RNA, 21 nt, Artificial Sequence
  SAMD9L targeting guide sequence portion
aauuagagguuagccauaaug

SEQ ID NO: 10246 - RNA, 21 nt, Artificial Sequence
  SAMD9L targeting guide sequence portion
aauuauuucuucacugugaca

SEQ ID NO: 10247 - RNA, 21 nt, Artificial Sequence
  SAMD9L targeting guide sequence portion
aauuauuugagucugaaaaug

SEQ ID NO: 10248 - RNA, 21 nt, Artificial Sequence
  SAMD9L targeting guide sequence portion
aauucauucagggaggcaaaa

SEQ ID NO: 10249 - RNA, 21 nt, Artificial Sequence
  SAMD9L targeting guide sequence portion
aauugaguuuaacacagauuu

SEQ ID NO: 10250 - RNA, 21 nt, Artificial Sequence
  SAMD9L targeting guide sequence portion
aauugcuuuuauaaguuuucu

SEQ ID NO: 10251 - RNA, 21 nt, Artificial Sequence
  SAMD9L targeting guide sequence portion
aauuuagaaaacuuauaaaag

SEQ ID NO: 10252 - RNA, 21 nt, Artificial Sequence
  SAMD9L targeting guide sequence portion
acaaaguggagucaaucuuuu

SEQ ID NO: 10253 - RNA, 21 nt, Artificial Sequence
  SAMD9L targeting guide sequence portion
acaagccuuuuuaagauauga

SEQ ID NO: 10254 - RNA, 21 nt, Artificial Sequence
  SAMD9L targeting guide sequence portion
acacagauuuuauugcccuau

SEQ ID NO: 10255 - RNA, 21 nt, Artificial Sequence
  SAMD9L targeting guide sequence portion
acaccagaguucuauuuaccu

SEQ ID NO: 10256 - RNA, 21 nt, Artificial Sequence
  SAMD9L targeting guide sequence portion
acagauccacaccagaguucu

SEQ ID NO: 10257 - RNA, 21 nt, Artificial Sequence
  SAMD9L targeting guide sequence portion
acagauuuuauugcccuauag

SEQ ID NO: 10258 - RNA, 21 nt, Artificial Sequence
  SAMD9L targeting guide sequence portion
acagauuuugcuuuugccucc

SEQ ID NO: 10259 - RNA, 21 nt, Artificial Sequence
  SAMD9L targeting guide sequence portion
acagcaaagauuuaaauaaga

SEQ ID NO: 10260 - RNA, 21 nt, Artificial Sequence
  SAMD9L targeting guide sequence portion
acagugaagaaauaauuuaga

SEQ ID NO: 10261 - RNA, 21 nt, Artificial Sequence
  SAMD9L targeting guide sequence portion
acaguuaugaugugaccagug

SEQ ID NO: 10262 - RNA, 21 nt, Artificial Sequence
  SAMD9L targeting guide sequence portion
acaucauaacugucuauaggg

SEQ ID NO: 10263 - RNA, 21 nt, Artificial Sequence
  SAMD9L targeting guide sequence portion
acauuaaaagauugacuccac

SEQ ID NO: 10264 - RNA, 21 nt, Artificial Sequence
  SAMD9L targeting guide sequence portion
acauuauggcuaaccucuaau

SEQ ID NO: 10265 - RNA, 21 nt, Artificial Sequence
  SAMD9L targeting guide sequence portion
acauucaucuuauuuaaaucu

SEQ ID NO: 10266 - RNA, 21 nt, Artificial Sequence
  SAMD9L targeting guide sequence portion
accaagaugagguaaauagaa

SEQ ID NO: 10267 - RNA, 21 nt, Artificial Sequence
  SAMD9L targeting guide sequence portion
accagaguucuauuuaccuca

SEQ ID NO: 10268 - RNA, 21 nt, Artificial Sequence
  SAMD9L targeting guide sequence portion
accaguggauaucaaugaaac

SEQ ID NO: 10269 - RNA, 21 nt, Artificial Sequence
  SAMD9L targeting guide sequence portion
acccacagauccacaccagag

SEQ ID NO: 10270 - RNA, 21 nt, Artificial Sequence
  SAMD9L targeting guide sequence portion
acccgcagagcuuggcacaaa

SEQ ID NO: 10271 - RNA, 21 nt, Artificial Sequence
  SAMD9L targeting guide sequence portion
accucuaauuacagauuuugc

SEQ ID NO: 10272 - RNA, 21 nt, Artificial Sequence
  SAMD9L targeting guide sequence portion
acguuuauuuauaucuuuaug

SEQ ID NO: 10273 - RNA, 21 nt, Artificial Sequence
  SAMD9L targeting guide sequence portion
acucaaacccacagauccaca

SEQ ID NO: 10274 - RNA, 21 nt, Artificial Sequence
  SAMD9L targeting guide sequence portion
acucaaauaauuaagaaguuu

SEQ ID NO: 10275 - RNA, 21 nt, Artificial Sequence
  SAMD9L targeting guide sequence portion
acucaauugcuuuuauaaguu

SEQ ID NO: 10276 - RNA, 21 nt, Artificial Sequence
  SAMD9L targeting guide sequence portion
acuccacuuugugccaagcuc

SEQ ID NO: 10277 - RNA, 21 nt, Artificial Sequence
  SAMD9L targeting guide sequence portion
acucugguguggaucuguggg

SEQ ID NO: 10278 - RNA, 21 nt, Artificial Sequence
  SAMD9L targeting guide sequence portion
acuggucacaucauaacuguc

SEQ ID NO: 10279 - RNA, 21 nt, Artificial Sequence
  SAMD9L targeting guide sequence portion
acugucuauagggcaauaaaa

SEQ ID NO: 10280 - RNA, 21 nt, Artificial Sequence
  SAMD9L targeting guide sequence portion
acugugacagcaaagauuuaa

SEQ ID NO: 10281 - RNA, 21 nt, Artificial Sequence
  SAMD9L targeting guide sequence portion
acuuauaaaagcaauugaguu

SEQ ID NO: 10282 - RNA, 21 nt, Artificial Sequence
  SAMD9L targeting guide sequence portion
acuucuuaauuauuugagucu

SEQ ID NO: 10283 - RNA, 21 nt, Artificial Sequence
  SAMD9L targeting guide sequence portion
acuuucauaacauuauggcua

SEQ ID NO: 10284 - RNA, 21 nt, Artificial Sequence
  SAMD9L targeting guide sequence portion
acuuugugccaagcucugcgg

SEQ ID NO: 10285 - RNA, 21 nt, Artificial Sequence
  SAMD9L targeting guide sequence portion
agaaaacuuauaaaagcaauu

SEQ ID NO: 10286 - RNA, 21 nt, Artificial Sequence
  SAMD9L targeting guide sequence portion
agaaagcuuauuggacucaaa

SEQ ID NO: 10287 - RNA, 21 nt, Artificial Sequence
  SAMD9L targeting guide sequence portion
agaaauaauuuagaaaacuua

SEQ ID NO: 10288 - RNA, 21 nt, Artificial Sequence
  SAMD9L targeting guide sequence portion
agaacucugguguggaucugu

SEQ ID NO: 10289 - RNA, 21 nt, Artificial Sequence
  SAMD9L targeting guide sequence portion
agaaguuucauugauauccac

SEQ ID NO: 10290 - RNA, 21 nt, Artificial Sequence
  SAMD9L targeting guide sequence portion
agaauaaaaucauaaagauau

SEQ ID NO: 10291 - RNA, 21 nt, Artificial Sequence
  SAMD9L targeting guide sequence portion
agaauagagagagagaauaaa

SEQ ID NO: 10292 - RNA, 21 nt, Artificial Sequence
  SAMD9L targeting guide sequence portion
agacaguuaugaugugaccag

SEQ ID NO: 10293 - RNA, 21 nt, Artificial Sequence
  SAMD9L targeting guide sequence portion
agacucaaauaauuaagaagu

SEQ ID NO: 10294 - RNA, 21 nt, Artificial Sequence
  SAMD9L targeting guide sequence portion
agagaaagcuuauuggacuca

SEQ ID NO: 10295 - RNA, 21 nt, Artificial Sequence
  SAMD9L targeting guide sequence portion
agagaauaaaaucauaaagau

SEQ ID NO: 10296 - RNA, 21 nt, Artificial Sequence
  SAMD9L targeting guide sequence portion
agagagaauaaaaucauaaag

SEQ ID NO: 10297 - RNA, 21 nt, Artificial Sequence
  SAMD9L targeting guide sequence portion
agagagagaauaaaaucauaa

SEQ ID NO: 10298 - RNA, 21 nt, Artificial Sequence
  SAMD9L targeting guide sequence portion
agagagagagaauaaaaucau

SEQ ID NO: 10299 - RNA, 21 nt, Artificial Sequence
  SAMD9L targeting guide sequence portion
agagcuuggcacaaaguggag

SEQ ID NO: 10300 - RNA, 21 nt, Artificial Sequence
  SAMD9L targeting guide sequence portion
agagguuagccauaauguuau

SEQ ID NO: 10301 - RNA, 21 nt, Artificial Sequence
  SAMD9L targeting guide sequence portion
agaguucuauuuaccucaucu

SEQ ID NO: 10302 - RNA, 21 nt, Artificial Sequence
  SAMD9L targeting guide sequence portion
agauauaaauaaacguauuug

SEQ ID NO: 10303 - RNA, 21 nt, Artificial Sequence
  SAMD9L targeting guide sequence portion
agauaugaaauaugccuaccc

SEQ ID NO: 10304 - RNA, 21 nt, Artificial Sequence
  SAMD9L targeting guide sequence portion
agauccacaccagaguucuau

SEQ ID NO: 10305 - RNA, 21 nt, Artificial Sequence
  SAMD9L targeting guide sequence portion
agaugaauguaaaagagaaag

SEQ ID NO: 10306 - RNA, 21 nt, Artificial Sequence
  SAMD9L targeting guide sequence portion
agaugagguaaauagaacucu

SEQ ID NO: 10307 - RNA, 21 nt, Artificial Sequence
  SAMD9L targeting guide sequence portion
agauugacuccacuuugugcc

SEQ ID NO: 10308 - RNA, 21 nt, Artificial Sequence
  SAMD9L targeting guide sequence portion
agauuuaaauaagaugaaugu

SEQ ID NO: 10309 - RNA, 21 nt, Artificial Sequence
  SAMD9L targeting guide sequence portion
agauuuuauugcccuauagac

SEQ ID NO: 10310 - RNA, 21 nt, Artificial Sequence
  SAMD9L targeting guide sequence portion
agauuuugcuuuugccucccu

SEQ ID NO: 10311 - RNA, 21 nt, Artificial Sequence
  SAMD9L targeting guide sequence portion
agcaaaaucuguaauuagagg

SEQ ID NO: 10312 - RNA, 21 nt, Artificial Sequence
  SAMD9L targeting guide sequence portion
agcaaagauuuaaauaagaug

SEQ ID NO: 10313 - RNA, 21 nt, Artificial Sequence
  SAMD9L targeting guide sequence portion
agcaauugaguuuaacacaga

SEQ ID NO: 10314 - RNA, 21 nt, Artificial Sequence
  SAMD9L targeting guide sequence portion
agccauaauguuaugaaagug

SEQ ID NO: 10315 - RNA, 21 nt, Artificial Sequence
  SAMD9L targeting guide sequence portion
agccuuuuuaagauaugaaau

SEQ ID NO: 10316 - RNA, 21 nt, Artificial Sequence
  SAMD9L targeting guide sequence portion
agcucugcggguaggcauauu

SEQ ID NO: 10317 - RNA, 21 nt, Artificial Sequence
  SAMD9L targeting guide sequence portion
agcuuauuggacucaaaccca

SEQ ID NO: 10318 - RNA, 21 nt, Artificial Sequence
  SAMD9L targeting guide sequence portion
agcuuggcacaaaguggaguc

SEQ ID NO: 10319 - RNA, 21 nt, Artificial Sequence
  SAMD9L targeting guide sequence portion
agcuuucucuuuuacauucau

SEQ ID NO: 10320 - RNA, 21 nt, Artificial Sequence
  SAMD9L targeting guide sequence portion
aggcaaaagcaaaaucuguaa

SEQ ID NO: 10321 - RNA, 21 nt, Artificial Sequence
  SAMD9L targeting guide sequence portion
aggcauauuucauaucuuaaa

SEQ ID NO: 10322 - RNA, 21 nt, Artificial Sequence
  SAMD9L targeting guide sequence portion
aggcuuguaauucauucaggg

SEQ ID NO: 10323 - RNA, 21 nt, Artificial Sequence
  SAMD9L targeting guide sequence portion
agggaggcaaaagcaaaaucu

SEQ ID NO: 10324 - RNA, 21 nt, Artificial Sequence
  SAMD9L targeting guide sequence portion
agggcaauaaaaucuguguua

SEQ ID NO: 10325 - RNA, 21 nt, Artificial Sequence
  SAMD9L targeting guide sequence portion
agguaaauagaacucuggugu

SEQ ID NO: 10326 - RNA, 21 nt, Artificial Sequence
  SAMD9L targeting guide sequence portion
agguaaauauauuguucccca

SEQ ID NO: 10327 - RNA, 21 nt, Artificial Sequence
  SAMD9L targeting guide sequence portion
agguuagccauaauguuauga

SEQ ID NO: 10328 - RNA, 21 nt, Artificial Sequence
  SAMD9L targeting guide sequence portion
agucaaucuuuuaauguuuua

SEQ ID NO: 10329 - RNA, 21 nt, Artificial Sequence
  SAMD9L targeting guide sequence portion
aguccaauaagcuuucucuuu

SEQ ID NO: 10330 - RNA, 21 nt, Artificial Sequence
  SAMD9L targeting guide sequence portion
agucugaaaaugcauauuuaa

SEQ ID NO: 10331 - RNA, 21 nt, Artificial Sequence
  SAMD9L targeting guide sequence portion
agugaagaaauaauuuagaaa

SEQ ID NO: 10332 - RNA, 21 nt, Artificial Sequence
  SAMD9L targeting guide sequence portion
agugccaugagaauagagaga

SEQ ID NO: 10333 - RNA, 21 nt, Artificial Sequence
  SAMD9L targeting guide sequence portion
aguggagucaaucuuuuaaug

SEQ ID NO: 10334 - RNA, 21 nt, Artificial Sequence
  SAMD9L targeting guide sequence portion
aguggauaucaaugaaacuuc

SEQ ID NO: 10335 - RNA, 21 nt, Artificial Sequence
  SAMD9L targeting guide sequence portion
aguuaugaugugaccagugga

SEQ ID NO: 10336 - RNA, 21 nt, Artificial Sequence
  SAMD9L targeting guide sequence portion
aguucaaauacguuuauuuau

SEQ ID NO: 10337 - RNA, 21 nt, Artificial Sequence
  SAMD9L targeting guide sequence portion
aguucuauuuaccucaucuug

SEQ ID NO: 10338 - RNA, 21 nt, Artificial Sequence
  SAMD9L targeting guide sequence portion
aguuuaacacagauuuuauug

SEQ ID NO: 10339 - RNA, 21 nt, Artificial Sequence
  SAMD9L targeting guide sequence portion
aguuucauugauauccacugg

SEQ ID NO: 10340 - RNA, 21 nt, Artificial Sequence
  SAMD9L targeting guide sequence portion
aguuuucuaaauuauuucuuc

SEQ ID NO: 10341 - RNA, 21 nt, Artificial Sequence
  SAMD9L targeting guide sequence portion
aguuuuuauugauaccaagau

SEQ ID NO: 10342 - RNA, 21 nt, Artificial Sequence
  SAMD9L targeting guide sequence portion
auaaaagcaauugaguuuaac

SEQ ID NO: 10343 - RNA, 21 nt, Artificial Sequence
  SAMD9L targeting guide sequence portion
auaaaaucauaaagauauaaa

SEQ ID NO: 10344 - RNA, 21 nt, Artificial Sequence
  SAMD9L targeting guide sequence portion
auaaaaucuguguuaaacuca

SEQ ID NO: 10345 - RNA, 21 nt, Artificial Sequence
  SAMD9L targeting guide sequence portion
auaaagauauaaauaaacgua

SEQ ID NO: 10346 - RNA, 21 nt, Artificial Sequence
  SAMD9L targeting guide sequence portion
auaaauaaacguauuugaacu

SEQ ID NO: 10347 - RNA, 21 nt, Artificial Sequence
  SAMD9L targeting guide sequence portion
auaacauuauggcuaaccucu

SEQ ID NO: 10348 - RNA, 21 nt, Artificial Sequence
  SAMD9L targeting guide sequence portion
auaacugucuauagggcaaua

SEQ ID NO: 10349 - RNA, 21 nt, Artificial Sequence
  SAMD9L targeting guide sequence portion
auaagaugaauguaaaagaga

SEQ ID NO: 10350 - RNA, 21 nt, Artificial Sequence
  SAMD9L targeting guide sequence portion
auaagcuuucucuuuuacauu

SEQ ID NO: 10351 - RNA, 21 nt, Artificial Sequence
  SAMD9L targeting guide sequence portion
auaaguuuucuaaauuauuuc

SEQ ID NO: 10352 - RNA, 21 nt, Artificial Sequence
  SAMD9L targeting guide sequence portion
auaaguuuuuauugauaccaa

SEQ ID NO: 10353 - RNA, 21 nt, Artificial Sequence
  SAMD9L targeting guide sequence portion
auaauguuaugaaagugccau

SEQ ID NO: 10354 - RNA, 21 nt, Artificial Sequence
  SAMD9L targeting guide sequence portion
auaauuaagaaguuucauuga

SEQ ID NO: 10355 - RNA, 21 nt, Artificial Sequence
  SAMD9L targeting guide sequence portion
auaauuuagaaaacuuauaaa

SEQ ID NO: 10356 - RNA, 21 nt, Artificial Sequence
  SAMD9L targeting guide sequence portion
auaccaagaugagguaaauag

SEQ ID NO: 10357 - RNA, 21 nt, Artificial Sequence
  SAMD9L targeting guide sequence portion
auacguuuauuuauaucuuua

SEQ ID NO: 10358 - RNA, 21 nt, Artificial Sequence
  SAMD9L targeting guide sequence portion
auagaacucugguguggaucu

SEQ ID NO: 10359 - RNA, 21 nt, Artificial Sequence
  SAMD9L targeting guide sequence portion
auagacaguuaugaugugacc

SEQ ID NO: 10360 - RNA, 21 nt, Artificial Sequence
  SAMD9L targeting guide sequence portion
auagagagagagaauaaaauc

SEQ ID NO: 10361 - RNA, 21 nt, Artificial Sequence
  SAMD9L targeting guide sequence portion
auagggcaauaaaaucugugu

SEQ ID NO: 10362 - RNA, 21 nt, Artificial Sequence
  SAMD9L targeting guide sequence portion
auauaaauaaacguauuugaa

SEQ ID NO: 10363 - RNA, 21 nt, Artificial Sequence
  SAMD9L targeting guide sequence portion
auaucaaugaaacuucuuaau

SEQ ID NO: 10364 - RNA, 21 nt, Artificial Sequence
  SAMD9L targeting guide sequence portion
auauccacuggucacaucaua

SEQ ID NO: 10365 - RNA, 21 nt, Artificial Sequence
  SAMD9L targeting guide sequence portion
auaucuuaaaaaggcuuguaa

SEQ ID NO: 10366 - RNA, 21 nt, Artificial Sequence
  SAMD9L targeting guide sequence portion
auaucuuuaugauuuuauucu

SEQ ID NO: 10367 - RNA, 21 nt, Artificial Sequence
  SAMD9L targeting guide sequence portion
auaugaaauaugccuacccgc

SEQ ID NO: 10368 - RNA, 21 nt, Artificial Sequence
  SAMD9L targeting guide sequence portion
auaugcauuuucagacucaaa

SEQ ID NO: 10369 - RNA, 21 nt, Artificial Sequence
  SAMD9L targeting guide sequence portion
auaugccuacccgcagagcuu

SEQ ID NO: 10370 - RNA, 21 nt, Artificial Sequence
  SAMD9L targeting guide sequence portion
auauuuaaaacauuaaaagau

SEQ ID NO: 10371 - RNA, 21 nt, Artificial Sequence
  SAMD9L targeting guide sequence portion
auauuucauaucuuaaaaagg

SEQ ID NO: 10372 - RNA, 21 nt, Artificial Sequence
  SAMD9L targeting guide sequence portion
aucaaugaaacuucuuaauua

SEQ ID NO: 10373 - RNA, 21 nt, Artificial Sequence
  SAMD9L targeting guide sequence portion
aucauaaagauauaaauaaac

SEQ ID NO: 10374 - RNA, 21 nt, Artificial Sequence
  SAMD9L targeting guide sequence portion
aucauaacugucuauagggca

SEQ ID NO: 10375 - RNA, 21 nt, Artificial Sequence
  SAMD9L targeting guide sequence portion
auccacaccagaguucuauuu

SEQ ID NO: 10376 - RNA, 21 nt, Artificial Sequence
  SAMD9L targeting guide sequence portion
auccacuggucacaucauaac

SEQ ID NO: 10377 - RNA, 21 nt, Artificial Sequence
  SAMD9L targeting guide sequence portion
aucuguaauuagagguuagcc

SEQ ID NO: 10378 - RNA, 21 nt, Artificial Sequence
  SAMD9L targeting guide sequence portion
aucuguggguuugaguccaau

SEQ ID NO: 10379 - RNA, 21 nt, Artificial Sequence
  SAMD9L targeting guide sequence portion
aucuguguuaaacucaauugc

SEQ ID NO: 10380 - RNA, 21 nt, Artificial Sequence
  SAMD9L targeting guide sequence portion
aucuuaaaaaggcuuguaauu

SEQ ID NO: 10381 - RNA, 21 nt, Artificial Sequence
  SAMD9L targeting guide sequence portion
aucuuauuuaaaucuuugcug

SEQ ID NO: 10382 - RNA, 21 nt, Artificial Sequence
  SAMD9L targeting guide sequence portion
aucuuuaugauuuuauucucu

SEQ ID NO: 10383 - RNA, 21 nt, Artificial Sequence
  SAMD9L targeting guide sequence portion
aucuuugcugucacagugaag

SEQ ID NO: 10384 - RNA, 21 nt, Artificial Sequence
  SAMD9L targeting guide sequence portion
aucuuuuaauguuuuaaauau

SEQ ID NO: 10385 - RNA, 21 nt, Artificial Sequence
  SAMD9L targeting guide sequence portion
augaaacuucuuaauuauuug

SEQ ID NO: 10386 - RNA, 21 nt, Artificial Sequence
  SAMD9L targeting guide sequence portion
augaaagugccaugagaauag

SEQ ID NO: 10387 - RNA, 21 nt, Artificial Sequence
  SAMD9L targeting guide sequence portion
augaaauaugccuacccgcag

SEQ ID NO: 10388 - RNA, 21 nt, Artificial Sequence
  SAMD9L targeting guide sequence portion
augaauguaaaagagaaagcu

SEQ ID NO: 10389 - RNA, 21 nt, Artificial Sequence
  SAMD9L targeting guide sequence portion
augaauuacaagccuuuuuaa

SEQ ID NO: 10390 - RNA, 21 nt, Artificial Sequence
  SAMD9L targeting guide sequence portion
augagaauagagagagagaau

SEQ ID NO: 10391 - RNA, 21 nt, Artificial Sequence
  SAMD9L targeting guide sequence portion
augagguaaauagaacucugg

SEQ ID NO: 10392 - RNA, 21 nt, Artificial Sequence
  SAMD9L targeting guide sequence portion
augaugugaccaguggauauc

SEQ ID NO: 10393 - RNA, 21 nt, Artificial Sequence
  SAMD9L targeting guide sequence portion
augauuuuauucucucucucu

SEQ ID NO: 10394 - RNA, 21 nt, Artificial Sequence
  SAMD9L targeting guide sequence portion
augcauauuuaaaacauuaaa

SEQ ID NO: 10395 - RNA, 21 nt, Artificial Sequence
  SAMD9L targeting guide sequence portion
augcauuuucagacucaaaua

SEQ ID NO: 10396 - RNA, 21 nt, Artificial Sequence
  SAMD9L targeting guide sequence portion
augccuacccgcagagcuugg

SEQ ID NO: 10397 - RNA, 21 nt, Artificial Sequence
  SAMD9L targeting guide sequence portion
auggcacuuucauaacauuau

SEQ ID NO: 10398 - RNA, 21 nt, Artificial Sequence
  SAMD9L targeting guide sequence portion
auggcuaaccucuaauuacag

SEQ ID NO: 10399 - RNA, 21 nt, Artificial Sequence
  SAMD9L targeting guide sequence portion
auggggaacaauauauuuacc

SEQ ID NO: 10400 - RNA, 21 nt, Artificial Sequence
  SAMD9L targeting guide sequence portion
auguaaaagagaaagcuuauu

SEQ ID NO: 10401 - RNA, 21 nt, Artificial Sequence
  SAMD9L targeting guide sequence portion
augugaccaguggauaucaau

SEQ ID NO: 10402 - RNA, 21 nt, Artificial Sequence
  SAMD9L targeting guide sequence portion
auguggaagguaaauauauug

SEQ ID NO: 10403 - RNA, 21 nt, Artificial Sequence
  SAMD9L targeting guide sequence portion
augugguggauggggaacaau

SEQ ID NO: 10404 - RNA, 21 nt, Artificial Sequence
  SAMD9L targeting guide sequence portion
auguuaugaaagugccaugag

SEQ ID NO: 10405 - RNA, 21 nt, Artificial Sequence
  SAMD9L targeting guide sequence portion
auguuuuaaauaugcauuuuc

SEQ ID NO: 10406 - RNA, 21 nt, Artificial Sequence
  SAMD9L targeting guide sequence portion
auuaaaagauugacuccacuu

SEQ ID NO: 10407 - RNA, 21 nt, Artificial Sequence
  SAMD9L targeting guide sequence portion
auuaagaaguuucauugauau

SEQ ID NO: 10408 - RNA, 21 nt, Artificial Sequence
  SAMD9L targeting guide sequence portion
auuacaagccuuuuuaagaua

SEQ ID NO: 10409 - RNA, 21 nt, Artificial Sequence
  SAMD9L targeting guide sequence portion
auuacagauuuugcuuuugcc

SEQ ID NO: 10410 - RNA, 21 nt, Artificial Sequence
  SAMD9L targeting guide sequence portion
auuagagguuagccauaaugu

SEQ ID NO: 10411 - RNA, 21 nt, Artificial Sequence
  SAMD9L targeting guide sequence portion
auuauggcuaaccucuaauua

SEQ ID NO: 10412 - RNA, 21 nt, Artificial Sequence
  SAMD9L targeting guide sequence portion
auuauuucuucacugugacag

SEQ ID NO: 10413 - RNA, 21 nt, Artificial Sequence
  SAMD9L targeting guide sequence portion
auuauuugagucugaaaaugc

SEQ ID NO: 10414 - RNA, 21 nt, Artificial Sequence
  SAMD9L targeting guide sequence portion
auucagggaggcaaaagcaaa

SEQ ID NO: 10415 - RNA, 21 nt, Artificial Sequence
  SAMD9L targeting guide sequence portion
auucaucuuauuuaaaucuuu

SEQ ID NO: 10416 - RNA, 21 nt, Artificial Sequence
  SAMD9L targeting guide sequence portion
auucauucagggaggcaaaag

SEQ ID NO: 10417 - RNA, 21 nt, Artificial Sequence
  SAMD9L targeting guide sequence portion
auucucauggcacuuucauaa

SEQ ID NO: 10418 - RNA, 21 nt, Artificial Sequence
  SAMD9L targeting guide sequence portion
auucucucucucuauucucau

SEQ ID NO: 10419 - RNA, 21 nt, Artificial Sequence
  SAMD9L targeting guide sequence portion
auugacuccacuuugugccaa

SEQ ID NO: 10420 - RNA, 21 nt, Artificial Sequence
  SAMD9L targeting guide sequence portion
auugaguuuaacacagauuuu

SEQ ID NO: 10421 - RNA, 21 nt, Artificial Sequence
  SAMD9L targeting guide sequence portion
auugauaccaagaugagguaa

SEQ ID NO: 10422 - RNA, 21 nt, Artificial Sequence
  SAMD9L targeting guide sequence portion
auugauauccacuggucacau

SEQ ID NO: 10423 - RNA, 21 nt, Artificial Sequence
  SAMD9L targeting guide sequence portion
auugcccuauagacaguuaug

SEQ ID NO: 10424 - RNA, 21 nt, Artificial Sequence
  SAMD9L targeting guide sequence portion
auugcuuuuauaaguuuucua

SEQ ID NO: 10425 - RNA, 21 nt, Artificial Sequence
  SAMD9L targeting guide sequence portion
auuggacucaaacccacagau

SEQ ID NO: 10426 - RNA, 21 nt, Artificial Sequence
  SAMD9L targeting guide sequence portion
auuuaaaacauuaaaagauug

SEQ ID NO: 10427 - RNA, 21 nt, Artificial Sequence
  SAMD9L targeting guide sequence portion
auuuaaauaagaugaauguaa

SEQ ID NO: 10428 - RNA, 21 nt, Artificial Sequence
  SAMD9L targeting guide sequence portion
auuuaaaucuuugcugucaca

SEQ ID NO: 10429 - RNA, 21 nt, Artificial Sequence
  SAMD9L targeting guide sequence portion
auuuaccucaucuugguauca

SEQ ID NO: 10430 - RNA, 21 nt, Artificial Sequence
  SAMD9L targeting guide sequence portion
auuuagaaaacuuauaaaagc

SEQ ID NO: 10431 - RNA, 21 nt, Artificial Sequence
  SAMD9L targeting guide sequence portion
auuuauaucuuuaugauuuua

SEQ ID NO: 10432 - RNA, 21 nt, Artificial Sequence
  SAMD9L targeting guide sequence portion
auuucauaucuuaaaaaggcu

SEQ ID NO: 10433 - RNA, 21 nt, Artificial Sequence
  SAMD9L targeting guide sequence portion
auuucuucacugugacagcaa

SEQ ID NO: 10434 - RNA, 21 nt, Artificial Sequence
  SAMD9L targeting guide sequence portion
auuugagucugaaaaugcaua

SEQ ID NO: 10435 - RNA, 21 nt, Artificial Sequence
  SAMD9L targeting guide sequence portion
auuuuauucucucucucuauu

SEQ ID NO: 10436 - RNA, 21 nt, Artificial Sequence
  SAMD9L targeting guide sequence portion
auuuuauugcccuauagacag

SEQ ID NO: 10437 - RNA, 21 nt, Artificial Sequence
  SAMD9L targeting guide sequence portion
auuuucagacucaaauaauua

SEQ ID NO: 10438 - RNA, 21 nt, Artificial Sequence
  SAMD9L targeting guide sequence portion
auuuugcuuuugccucccuga

SEQ ID NO: 10439 - RNA, 21 nt, Artificial Sequence
  SAMD9L targeting guide sequence portion
caaaagcaaaaucuguaauua

SEQ ID NO: 10440 - RNA, 21 nt, Artificial Sequence
  SAMD9L targeting guide sequence portion
caaaaucuguaauuagagguu

SEQ ID NO: 10441 - RNA, 21 nt, Artificial Sequence
  SAMD9L targeting guide sequence portion
caaacccacagauccacacca

SEQ ID NO: 10442 - RNA, 21 nt, Artificial Sequence
  SAMD9L targeting guide sequence portion
caaagauuuaaauaagaugaa

SEQ ID NO: 10443 - RNA, 21 nt, Artificial Sequence
  SAMD9L targeting guide sequence portion
caaaguggagucaaucuuuua

SEQ ID NO: 10444 - RNA, 21 nt, Artificial Sequence
  SAMD9L targeting guide sequence portion
caaauaauuaagaaguuucau

SEQ ID NO: 10445 - RNA, 21 nt, Artificial Sequence
  SAMD9L targeting guide sequence portion
caaauacguuuauuuauaucu

SEQ ID NO: 10446 - RNA, 21 nt, Artificial Sequence
  SAMD9L targeting guide sequence portion
caagaugagguaaauagaacu

SEQ ID NO: 10447 - RNA, 21 nt, Artificial Sequence
  SAMD9L targeting guide sequence portion
caagccuuuuuaagauaugaa

SEQ ID NO: 10448 - RNA, 21 nt, Artificial Sequence
  SAMD9L targeting guide sequence portion
caagcucugcggguaggcaua

SEQ ID NO: 10449 - RNA, 21 nt, Artificial Sequence
  SAMD9L targeting guide sequence portion
caauaaaaucuguguuaaacu

SEQ ID NO: 10450 - RNA, 21 nt, Artificial Sequence
  SAMD9L targeting guide sequence portion
caauaagcuuucucuuuuaca

SEQ ID NO: 10451 - RNA, 21 nt, Artificial Sequence
  SAMD9L targeting guide sequence portion
caaucuuuuaauguuuuaaau

SEQ ID NO: 10452 - RNA, 21 nt, Artificial Sequence
  SAMD9L targeting guide sequence portion
caaugaaacuucuuaauuauu

SEQ ID NO: 10453 - RNA, 21 nt, Artificial Sequence
  SAMD9L targeting guide sequence portion
caauugaguuuaacacagauu

SEQ ID NO: 10454 - RNA, 21 nt, Artificial Sequence
  SAMD9L targeting guide sequence portion
caauugcuuuuauaaguuuuc

SEQ ID NO: 10455 - RNA, 21 nt, Artificial Sequence
  SAMD9L targeting guide sequence portion
cacaaaguggagucaaucuuu

SEQ ID NO: 10456 - RNA, 21 nt, Artificial Sequence
  SAMD9L targeting guide sequence portion
cacaccagaguucuauuuacc

SEQ ID NO: 10457 - RNA, 21 nt, Artificial Sequence
  SAMD9L targeting guide sequence portion
cacagauccacaccagaguuc

SEQ ID NO: 10458 - RNA, 21 nt, Artificial Sequence
  SAMD9L targeting guide sequence portion
cacagauuuuauugcccuaua

SEQ ID NO: 10459 - RNA, 21 nt, Artificial Sequence
  SAMD9L targeting guide sequence portion
cacagugaagaaauaauuuag

SEQ ID NO: 10460 - RNA, 21 nt, Artificial Sequence
  SAMD9L targeting guide sequence portion
cacaucauaacugucuauagg

SEQ ID NO: 10461 - RNA, 21 nt, Artificial Sequence
  SAMD9L targeting guide sequence portion
caccagaguucuauuuaccuc

SEQ ID NO: 10462 - RNA, 21 nt, Artificial Sequence
  SAMD9L targeting guide sequence portion
cacuggucacaucauaacugu

SEQ ID NO: 10463 - RNA, 21 nt, Artificial Sequence
  SAMD9L targeting guide sequence portion
cacugugacagcaaagauuua

SEQ ID NO: 10464 - RNA, 21 nt, Artificial Sequence
  SAMD9L targeting guide sequence portion
cacuuucauaacauuauggcu

SEQ ID NO: 10465 - RNA, 21 nt, Artificial Sequence
  SAMD9L targeting guide sequence portion
cacuuugugccaagcucugcg

SEQ ID NO: 10466 - RNA, 21 nt, Artificial Sequence
  SAMD9L targeting guide sequence portion
cagacucaaauaauuaagaag

SEQ ID NO: 10467 - RNA, 21 nt, Artificial Sequence
  SAMD9L targeting guide sequence portion
cagagcuuggcacaaagugga

SEQ ID NO: 10468 - RNA, 21 nt, Artificial Sequence
  SAMD9L targeting guide sequence portion
cagaguucuauuuaccucauc

SEQ ID NO: 10469 - RNA, 21 nt, Artificial Sequence
  SAMD9L targeting guide sequence portion
cagauccacaccagaguucua

SEQ ID NO: 10470 - RNA, 21 nt, Artificial Sequence
  SAMD9L targeting guide sequence portion
cagauuuuauugcccuauaga

SEQ ID NO: 10471 - RNA, 21 nt, Artificial Sequence
  SAMD9L targeting guide sequence portion
cagauuuugcuuuugccuccc

SEQ ID NO: 10472 - RNA, 21 nt, Artificial Sequence
  SAMD9L targeting guide sequence portion
cagcaaagauuuaaauaagau

SEQ ID NO: 10473 - RNA, 21 nt, Artificial Sequence
  SAMD9L targeting guide sequence portion
cagggaggcaaaagcaaaauc

SEQ ID NO: 10474 - RNA, 21 nt, Artificial Sequence
  SAMD9L targeting guide sequence portion
cagugaagaaauaauuuagaa

SEQ ID NO: 10475 - RNA, 21 nt, Artificial Sequence
  SAMD9L targeting guide sequence portion
caguggauaucaaugaaacuu

SEQ ID NO: 10476 - RNA, 21 nt, Artificial Sequence
  SAMD9L targeting guide sequence portion
caguuaugaugugaccagugg

SEQ ID NO: 10477 - RNA, 21 nt, Artificial Sequence
  SAMD9L targeting guide sequence portion
cauaaagauauaaauaaacgu

SEQ ID NO: 10478 - RNA, 21 nt, Artificial Sequence
  SAMD9L targeting guide sequence portion
cauaacauuauggcuaaccuc

SEQ ID NO: 10479 - RNA, 21 nt, Artificial Sequence
  SAMD9L targeting guide sequence portion
cauaacugucuauagggcaau

SEQ ID NO: 10480 - RNA, 21 nt, Artificial Sequence
  SAMD9L targeting guide sequence portion
cauaauguuaugaaagugcca

SEQ ID NO: 10481 - RNA, 21 nt, Artificial Sequence
  SAMD9L targeting guide sequence portion
cauaucuuaaaaaggcuugua

SEQ ID NO: 10482 - RNA, 21 nt, Artificial Sequence
  SAMD9L targeting guide sequence portion
cauauuuaaaacauuaaaaga

SEQ ID NO: 10483 - RNA, 21 nt, Artificial Sequence
  SAMD9L targeting guide sequence portion
cauauuucauaucuuaaaaag

SEQ ID NO: 10484 - RNA, 21 nt, Artificial Sequence
  SAMD9L targeting guide sequence portion
caucauaacugucuauagggc

SEQ ID NO: 10485 - RNA, 21 nt, Artificial Sequence
  SAMD9L targeting guide sequence portion
caucuuauuuaaaucuuugcu

SEQ ID NO: 10486 - RNA, 21 nt, Artificial Sequence
  SAMD9L targeting guide sequence portion
caugagaauagagagagagaa

SEQ ID NO: 10487 - RNA, 21 nt, Artificial Sequence
  SAMD9L targeting guide sequence portion
cauggcacuuucauaacauua

SEQ ID NO: 10488 - RNA, 21 nt, Artificial Sequence
  SAMD9L targeting guide sequence portion
cauuaaaagauugacuccacu

SEQ ID NO: 10489 - RNA, 21 nt, Artificial Sequence
  SAMD9L targeting guide sequence portion
cauuauggcuaaccucuaauu

SEQ ID NO: 10490 - RNA, 21 nt, Artificial Sequence
  SAMD9L targeting guide sequence portion
cauucagggaggcaaaagcaa

SEQ ID NO: 10491 - RNA, 21 nt, Artificial Sequence
  SAMD9L targeting guide sequence portion
cauucaucuuauuuaaaucuu

SEQ ID NO: 10492 - RNA, 21 nt, Artificial Sequence
  SAMD9L targeting guide sequence portion
cauugauauccacuggucaca

SEQ ID NO: 10493 - RNA, 21 nt, Artificial Sequence
  SAMD9L targeting guide sequence portion
cauuuucagacucaaauaauu

SEQ ID NO: 10494 - RNA, 21 nt, Artificial Sequence
  SAMD9L targeting guide sequence portion
ccaagaugagguaaauagaac

SEQ ID NO: 10495 - RNA, 21 nt, Artificial Sequence
  SAMD9L targeting guide sequence portion
ccaagcucugcggguaggcau

SEQ ID NO: 10496 - RNA, 21 nt, Artificial Sequence
  SAMD9L targeting guide sequence portion
ccaauaagcuuucucuuuuac

SEQ ID NO: 10497 - RNA, 21 nt, Artificial Sequence
  SAMD9L targeting guide sequence portion
ccacaccagaguucuauuuac

SEQ ID NO: 10498 - RNA, 21 nt, Artificial Sequence
  SAMD9L targeting guide sequence portion
ccacagauccacaccagaguu

SEQ ID NO: 10499 - RNA, 21 nt, Artificial Sequence
  SAMD9L targeting guide sequence portion
ccacuggucacaucauaacug

SEQ ID NO: 10500 - RNA, 21 nt, Artificial Sequence
  SAMD9L targeting guide sequence portion
ccacuuugugccaagcucugc

SEQ ID NO: 10501 - RNA, 21 nt, Artificial Sequence
  SAMD9L targeting guide sequence portion
ccagaguucuauuuaccucau

SEQ ID NO: 10502 - RNA, 21 nt, Artificial Sequence
  SAMD9L targeting guide sequence portion
ccaguggauaucaaugaaacu

SEQ ID NO: 10503 - RNA, 21 nt, Artificial Sequence
  SAMD9L targeting guide sequence portion
ccauaauguuaugaaagugcc

SEQ ID NO: 10504 - RNA, 21 nt, Artificial Sequence
  SAMD9L targeting guide sequence portion
ccaugagaauagagagagaga

SEQ ID NO: 10505 - RNA, 21 nt, Artificial Sequence
  SAMD9L targeting guide sequence portion
cccacagauccacaccagagu

SEQ ID NO: 10506 - RNA, 21 nt, Artificial Sequence
  SAMD9L targeting guide sequence portion
cccgcagagcuuggcacaaag

SEQ ID NO: 10507 - RNA, 21 nt, Artificial Sequence
  SAMD9L targeting guide sequence portion
cccuauagacaguuaugaugu

SEQ ID NO: 10508 - RNA, 21 nt, Artificial Sequence
  SAMD9L targeting guide sequence portion
cccugaaugaauuacaagccu

SEQ ID NO: 10509 - RNA, 21 nt, Artificial Sequence
  SAMD9L targeting guide sequence portion
ccgcagagcuuggcacaaagu

SEQ ID NO: 10510 - RNA, 21 nt, Artificial Sequence
  SAMD9L targeting guide sequence portion
ccuacccgcagagcuuggcac

SEQ ID NO: 10511 - RNA, 21 nt, Artificial Sequence
  SAMD9L targeting guide sequence portion
ccuauagacaguuaugaugug

SEQ ID NO: 10512 - RNA, 21 nt, Artificial Sequence
  SAMD9L targeting guide sequence portion
ccucccugaaugaauuacaag

SEQ ID NO: 10513 - RNA, 21 nt, Artificial Sequence
  SAMD9L targeting guide sequence portion
ccucuaauuacagauuuugcu

SEQ ID NO: 10514 - RNA, 21 nt, Artificial Sequence
  SAMD9L targeting guide sequence portion
ccugaaugaauuacaagccuu

SEQ ID NO: 10515 - RNA, 21 nt, Artificial Sequence
  SAMD9L targeting guide sequence portion
ccuuuuuaagauaugaaauau

SEQ ID NO: 10516 - RNA, 21 nt, Artificial Sequence
  SAMD9L targeting guide sequence portion
cgcagagcuuggcacaaagug

SEQ ID NO: 10517 - RNA, 21 nt, Artificial Sequence
  SAMD9L targeting guide sequence portion
cggguaggcauauuucauauc

SEQ ID NO: 10518 - RNA, 21 nt, Artificial Sequence
  SAMD9L targeting guide sequence portion
cguuuauuuauaucuuuauga

SEQ ID NO: 10519 - RNA, 21 nt, Artificial Sequence
  SAMD9L targeting guide sequence portion
cuaaauuauuucuucacugug

SEQ ID NO: 10520 - RNA, 21 nt, Artificial Sequence
  SAMD9L targeting guide sequence portion
cuaaccucuaauuacagauuu

SEQ ID NO: 10521 - RNA, 21 nt, Artificial Sequence
  SAMD9L targeting guide sequence portion
cuaauuacagauuuugcuuuu

SEQ ID NO: 10522 - RNA, 21 nt, Artificial Sequence
  SAMD9L targeting guide sequence portion
cuacccgcagagcuuggcaca

SEQ ID NO: 10523 - RNA, 21 nt, Artificial Sequence
  SAMD9L targeting guide sequence portion
cuauagacaguuaugauguga

SEQ ID NO: 10524 - RNA, 21 nt, Artificial Sequence
  SAMD9L targeting guide sequence portion
cuauagggcaauaaaaucugu

SEQ ID NO: 10525 - RNA, 21 nt, Artificial Sequence
  SAMD9L targeting guide sequence portion
cuauucucauggcacuuucau

SEQ ID NO: 10526 - RNA, 21 nt, Artificial Sequence
  SAMD9L targeting guide sequence portion
cuauuuaccucaucuugguau

SEQ ID NO: 10527 - RNA, 21 nt, Artificial Sequence
  SAMD9L targeting guide sequence portion
cucaaacccacagauccacac

SEQ ID NO: 10528 - RNA, 21 nt, Artificial Sequence
  SAMD9L targeting guide sequence portion
cucaaauaauuaagaaguuuc

SEQ ID NO: 10529 - RNA, 21 nt, Artificial Sequence
  SAMD9L targeting guide sequence portion
cucaauugcuuuuauaaguuu

SEQ ID NO: 10530 - RNA, 21 nt, Artificial Sequence
  SAMD9L targeting guide sequence portion
cucauggcacuuucauaacau

SEQ ID NO: 10531 - RNA, 21 nt, Artificial Sequence
  SAMD9L targeting guide sequence portion
cuccacuuugugccaagcucu

SEQ ID NO: 10532 - RNA, 21 nt, Artificial Sequence
  SAMD9L targeting guide sequence portion
cucccugaaugaauuacaagc

SEQ ID NO: 10533 - RNA, 21 nt, Artificial Sequence
  SAMD9L targeting guide sequence portion
cucuaauuacagauuuugcuu

SEQ ID NO: 10534 - RNA, 21 nt, Artificial Sequence
  SAMD9L targeting guide sequence portion
cucuauucucauggcacuuuc

SEQ ID NO: 10535 - RNA, 21 nt, Artificial Sequence
  SAMD9L targeting guide sequence portion
cucucuauucucauggcacuu

SEQ ID NO: 10536 - RNA, 21 nt, Artificial Sequence
  SAMD9L targeting guide sequence portion
cucucucuauucucauggcac

SEQ ID NO: 10537 - RNA, 21 nt, Artificial Sequence
  SAMD9L targeting guide sequence portion
cucucucucuauucucauggc

SEQ ID NO: 10538 - RNA, 21 nt, Artificial Sequence
  SAMD9L targeting guide sequence portion
cucugcggguaggcauauuuc

SEQ ID NO: 10539 - RNA, 21 nt, Artificial Sequence
  SAMD9L targeting guide sequence portion
cucugguguggaucugugggu

SEQ ID NO: 10540 - RNA, 21 nt, Artificial Sequence
  SAMD9L targeting guide sequence portion
cucuuuuacauucaucuuauu

SEQ ID NO: 10541 - RNA, 21 nt, Artificial Sequence
  SAMD9L targeting guide sequence portion
cugaaaaugcauauuuaaaac

SEQ ID NO: 10542 - RNA, 21 nt, Artificial Sequence
  SAMD9L targeting guide sequence portion
cugaaugaauuacaagccuuu

SEQ ID NO: 10543 - RNA, 21 nt, Artificial Sequence
  SAMD9L targeting guide sequence portion
cugcggguaggcauauuucau

SEQ ID NO: 10544 - RNA, 21 nt, Artificial Sequence
  SAMD9L targeting guide sequence portion
cuggucacaucauaacugucu

SEQ ID NO: 10545 - RNA, 21 nt, Artificial Sequence
  SAMD9L targeting guide sequence portion
cugguguggaucuguggguuu

SEQ ID NO: 10546 - RNA, 21 nt, Artificial Sequence
  SAMD9L targeting guide sequence portion
cuguaauuagagguuagccau

SEQ ID NO: 10547 - RNA, 21 nt, Artificial Sequence
  SAMD9L targeting guide sequence portion
cugucacagugaagaaauaau

SEQ ID NO: 10548 - RNA, 21 nt, Artificial Sequence
  SAMD9L targeting guide sequence portion
cugucuauagggcaauaaaau

SEQ ID NO: 10549 - RNA, 21 nt, Artificial Sequence
  SAMD9L targeting guide sequence portion
cugugacagcaaagauuuaaa

SEQ ID NO: 10550 - RNA, 21 nt, Artificial Sequence
  SAMD9L targeting guide sequence portion
cuguggguuugaguccaauaa

SEQ ID NO: 10551 - RNA, 21 nt, Artificial Sequence
  SAMD9L targeting guide sequence portion
cuguguuaaacucaauugcuu

SEQ ID NO: 10552 - RNA, 21 nt, Artificial Sequence
  SAMD9L targeting guide sequence portion
cuuaaaaaggcuuguaauuca

SEQ ID NO: 10553 - RNA, 21 nt, Artificial Sequence
  SAMD9L targeting guide sequence portion
cuuaauuauuugagucugaaa

SEQ ID NO: 10554 - RNA, 21 nt, Artificial Sequence
  SAMD9L targeting guide sequence portion
cuuauaaaagcaauugaguuu

SEQ ID NO: 10555 - RNA, 21 nt, Artificial Sequence
  SAMD9L targeting guide sequence portion
cuuauuggacucaaacccaca

SEQ ID NO: 10556 - RNA, 21 nt, Artificial Sequence
  SAMD9L targeting guide sequence portion
cuuauuuaaaucuuugcuguc

SEQ ID NO: 10557 - RNA, 21 nt, Artificial Sequence
  SAMD9L targeting guide sequence portion
cuucacugugacagcaaagau

SEQ ID NO: 10558 - RNA, 21 nt, Artificial Sequence
  SAMD9L targeting guide sequence portion
cuucuuaauuauuugagucug

SEQ ID NO: 10559 - RNA, 21 nt, Artificial Sequence
  SAMD9L targeting guide sequence portion
cuuggcacaaaguggagucaa

SEQ ID NO: 10560 - RNA, 21 nt, Artificial Sequence
  SAMD9L targeting guide sequence portion
cuuguaauucauucagggagg

SEQ ID NO: 10561 - RNA, 21 nt, Artificial Sequence
  SAMD9L targeting guide sequence portion
cuuuaugauuuuauucucucu

SEQ ID NO: 10562 - RNA, 21 nt, Artificial Sequence
  SAMD9L targeting guide sequence portion
cuuucauaacauuauggcuaa

SEQ ID NO: 10563 - RNA, 21 nt, Artificial Sequence
  SAMD9L targeting guide sequence portion
cuuucucuuuuacauucaucu

SEQ ID NO: 10564 - RNA, 21 nt, Artificial Sequence
  SAMD9L targeting guide sequence portion
cuuugcugucacagugaagaa

SEQ ID NO: 10565 - RNA, 21 nt, Artificial Sequence
  SAMD9L targeting guide sequence portion
cuuugugccaagcucugcggg

SEQ ID NO: 10566 - RNA, 21 nt, Artificial Sequence
  SAMD9L targeting guide sequence portion
cuuuuaauguuuuaaauaugc

SEQ ID NO: 10567 - RNA, 21 nt, Artificial Sequence
  SAMD9L targeting guide sequence portion
cuuuuacauucaucuuauuua

SEQ ID NO: 10568 - RNA, 21 nt, Artificial Sequence
  SAMD9L targeting guide sequence portion
cuuuuauaaguuuucuaaauu

SEQ ID NO: 10569 - RNA, 21 nt, Artificial Sequence
  SAMD9L targeting guide sequence portion
cuuuugccucccugaaugaau

SEQ ID NO: 10570 - RNA, 21 nt, Artificial Sequence
  SAMD9L targeting guide sequence portion
cuuuuuaagauaugaaauaug

SEQ ID NO: 10571 - RNA, 21 nt, Artificial Sequence
  SAMD9L targeting guide sequence portion
gaaaacuuauaaaagcaauug

SEQ ID NO: 10572 - RNA, 21 nt, Artificial Sequence
  SAMD9L targeting guide sequence portion
gaaaaugcauauuuaaaacau

SEQ ID NO: 10573 - RNA, 21 nt, Artificial Sequence
  SAMD9L targeting guide sequence portion
gaaacuucuuaauuauuugag

SEQ ID NO: 10574 - RNA, 21 nt, Artificial Sequence
  SAMD9L targeting guide sequence portion
gaaagcuuauuggacucaaac

SEQ ID NO: 10575 - RNA, 21 nt, Artificial Sequence
  SAMD9L targeting guide sequence portion
gaaagugccaugagaauagag

SEQ ID NO: 10576 - RNA, 21 nt, Artificial Sequence
  SAMD9L targeting guide sequence portion
gaaauaauuuagaaaacuuau

SEQ ID NO: 10577 - RNA, 21 nt, Artificial Sequence
  SAMD9L targeting guide sequence portion
gaaauaugccuacccgcagag

SEQ ID NO: 10578 - RNA, 21 nt, Artificial Sequence
  SAMD9L targeting guide sequence portion
gaacucugguguggaucugug

SEQ ID NO: 10579 - RNA, 21 nt, Artificial Sequence
  SAMD9L targeting guide sequence portion
gaagaaauaauuuagaaaacu

SEQ ID NO: 10580 - RNA, 21 nt, Artificial Sequence
  SAMD9L targeting guide sequence portion
gaagguaaauauauuguuccc

SEQ ID NO: 10581 - RNA, 21 nt, Artificial Sequence
  SAMD9L targeting guide sequence portion
gaaguuucauugauauccacu

SEQ ID NO: 10582 - RNA, 21 nt, Artificial Sequence
  SAMD9L targeting guide sequence portion
gaauaaaaucauaaagauaua

SEQ ID NO: 10583 - RNA, 21 nt, Artificial Sequence
  SAMD9L targeting guide sequence portion
gaauagagagagagaauaaaa

SEQ ID NO: 10584 - RNA, 21 nt, Artificial Sequence
  SAMD9L targeting guide sequence portion
gaaugaauuacaagccuuuuu

SEQ ID NO: 10585 - RNA, 21 nt, Artificial Sequence
  SAMD9L targeting guide sequence portion
gaauguaaaagagaaagcuua

SEQ ID NO: 10586 - RNA, 21 nt, Artificial Sequence
  SAMD9L targeting guide sequence portion
gaauuacaagccuuuuuaaga

SEQ ID NO: 10587 - RNA, 21 nt, Artificial Sequence
  SAMD9L targeting guide sequence portion
gacaauacaucaccuguaguu

SEQ ID NO: 10588 - RNA, 21 nt, Artificial Sequence
  SAMD9L targeting guide sequence portion
gacagcaaagauuuaaauaag

SEQ ID NO: 10589 - RNA, 21 nt, Artificial Sequence
  SAMD9L targeting guide sequence portion
gacaguuaugaugugaccagu

SEQ ID NO: 10590 - RNA, 21 nt, Artificial Sequence
  SAMD9L targeting guide sequence portion
gaccaguggauaucaaugaaa

SEQ ID NO: 10591 - RNA, 21 nt, Artificial Sequence
  SAMD9L targeting guide sequence portion
gacucaaacccacagauccac

SEQ ID NO: 10592 - RNA, 21 nt, Artificial Sequence
  SAMD9L targeting guide sequence portion
gacucaaauaauuaagaaguu

SEQ ID NO: 10593 - RNA, 21 nt, Artificial Sequence
  SAMD9L targeting guide sequence portion
gacuccacuuugugccaagcu

SEQ ID NO: 10594 - RNA, 21 nt, Artificial Sequence
  SAMD9L targeting guide sequence portion
gagaaagcuuauuggacucaa

SEQ ID NO: 10595 - RNA, 21 nt, Artificial Sequence
  SAMD9L targeting guide sequence portion
gagaauaaaaucauaaagaua

SEQ ID NO: 10596 - RNA, 21 nt, Artificial Sequence
  SAMD9L targeting guide sequence portion
gagaauagagagagagaauaa

SEQ ID NO: 10597 - RNA, 21 nt, Artificial Sequence
  SAMD9L targeting guide sequence portion
gagagaauaaaaucauaaaga

SEQ ID NO: 10598 - RNA, 21 nt, Artificial Sequence
  SAMD9L targeting guide sequence portion
gagagagaauaaaaucauaaa

SEQ ID NO: 10599 - RNA, 21 nt, Artificial Sequence
  SAMD9L targeting guide sequence portion
gagagagagaauaaaaucaua

SEQ ID NO: 10600 - RNA, 21 nt, Artificial Sequence
  SAMD9L targeting guide sequence portion
gagcuuggcacaaaguggagu

SEQ ID NO: 10601 - RNA, 21 nt, Artificial Sequence
  SAMD9L targeting guide sequence portion
gaggcaaaagcaaaaucugua

SEQ ID NO: 10602 - RNA, 21 nt, Artificial Sequence
  SAMD9L targeting guide sequence portion
gagguaaauagaacucuggug

SEQ ID NO: 10603 - RNA, 21 nt, Artificial Sequence
  SAMD9L targeting guide sequence portion
gagguuagccauaauguuaug

SEQ ID NO: 10604 - RNA, 21 nt, Artificial Sequence
  SAMD9L targeting guide sequence portion
gagucaaucuuuuaauguuuu

SEQ ID NO: 10605 - RNA, 21 nt, Artificial Sequence
  SAMD9L targeting guide sequence portion
gaguccaauaagcuuucucuu

SEQ ID NO: 10606 - RNA, 21 nt, Artificial Sequence
  SAMD9L targeting guide sequence portion
gagucugaaaaugcauauuua

SEQ ID NO: 10607 - RNA, 21 nt, Artificial Sequence
  SAMD9L targeting guide sequence portion
gaguucuauuuaccucaucuu

SEQ ID NO: 10608 - RNA, 21 nt, Artificial Sequence
  SAMD9L targeting guide sequence portion
gaguuuaacacagauuuuauu

SEQ ID NO: 10609 - RNA, 21 nt, Artificial Sequence
  SAMD9L targeting guide sequence portion
gauaccaagaugagguaaaua

SEQ ID NO: 10610 - RNA, 21 nt, Artificial Sequence
  SAMD9L targeting guide sequence portion
gauauaaauaaacguauuuga

SEQ ID NO: 10611 - RNA, 21 nt, Artificial Sequence
  SAMD9L targeting guide sequence portion
gauaucaaugaaacuucuuaa

SEQ ID NO: 10612 - RNA, 21 nt, Artificial Sequence
  SAMD9L targeting guide sequence portion
gauauccacuggucacaucau

SEQ ID NO: 10613 - RNA, 21 nt, Artificial Sequence
  SAMD9L targeting guide sequence portion
gauaugaaauaugccuacccg

SEQ ID NO: 10614 - RNA, 21 nt, Artificial Sequence
  SAMD9L targeting guide sequence portion
gauccacaccagaguucuauu

SEQ ID NO: 10615 - RNA, 21 nt, Artificial Sequence
  SAMD9L targeting guide sequence portion
gaucuguggguuugaguccaa

SEQ ID NO: 10616 - RNA, 21 nt, Artificial Sequence
  SAMD9L targeting guide sequence portion
gaugaauguaaaagagaaagc

SEQ ID NO: 10617 - RNA, 21 nt, Artificial Sequence
  SAMD9L targeting guide sequence portion
gaugagguaaauagaacucug

SEQ ID NO: 10618 - RNA, 21 nt, Artificial Sequence
  SAMD9L targeting guide sequence portion
gauggggaacaauauauuuac

SEQ ID NO: 10619 - RNA, 21 nt, Artificial Sequence
  SAMD9L targeting guide sequence portion
gaugugaccaguggauaucaa

SEQ ID NO: 10620 - RNA, 21 nt, Artificial Sequence
  SAMD9L targeting guide sequence portion
gauugacuccacuuugugcca

SEQ ID NO: 10621 - RNA, 21 nt, Artificial Sequence
  SAMD9L targeting guide sequence portion
gauuuaaauaagaugaaugua

SEQ ID NO: 10622 - RNA, 21 nt, Artificial Sequence
  SAMD9L targeting guide sequence portion
gauuuuauucucucucucuau

SEQ ID NO: 10623 - RNA, 21 nt, Artificial Sequence
  SAMD9L targeting guide sequence portion
gauuuuauugcccuauagaca

SEQ ID NO: 10624 - RNA, 21 nt, Artificial Sequence
  SAMD9L targeting guide sequence portion
gauuuugcuuuugccucccug

SEQ ID NO: 10625 - RNA, 21 nt, Artificial Sequence
  SAMD9L targeting guide sequence portion
gcaaaagcaaaaucuguaauu

SEQ ID NO: 10626 - RNA, 21 nt, Artificial Sequence
  SAMD9L targeting guide sequence portion
gcaaaaucuguaauuagaggu

SEQ ID NO: 10627 - RNA, 21 nt, Artificial Sequence
  SAMD9L targeting guide sequence portion
gcaaagauuuaaauaagauga

SEQ ID NO: 10628 - RNA, 21 nt, Artificial Sequence
  SAMD9L targeting guide sequence portion
gcaauaaaaucuguguuaaac

SEQ ID NO: 10629 - RNA, 21 nt, Artificial Sequence
  SAMD9L targeting guide sequence portion
gcaauugaguuuaacacagau

SEQ ID NO: 10630 - RNA, 21 nt, Artificial Sequence
  SAMD9L targeting guide sequence portion
gcacaaaguggagucaaucuu

SEQ ID NO: 10631 - RNA, 21 nt, Artificial Sequence
  SAMD9L targeting guide sequence portion
gcacuuucauaacauuauggc

SEQ ID NO: 10632 - RNA, 21 nt, Artificial Sequence
  SAMD9L targeting guide sequence portion
gcagagcuuggcacaaagugg

SEQ ID NO: 10633 - RNA, 21 nt, Artificial Sequence
  SAMD9L targeting guide sequence portion
gcauauuuaaaacauuaaaag

SEQ ID NO: 10634 - RNA, 21 nt, Artificial Sequence
  SAMD9L targeting guide sequence portion
gcauauuucauaucuuaaaaa

SEQ ID NO: 10635 - RNA, 21 nt, Artificial Sequence
  SAMD9L targeting guide sequence portion
gcauuuucagacucaaauaau

SEQ ID NO: 10636 - RNA, 21 nt, Artificial Sequence
  SAMD9L targeting guide sequence portion
gccaagcucugcggguaggca

SEQ ID NO: 10637 - RNA, 21 nt, Artificial Sequence
  SAMD9L targeting guide sequence portion
gccauaauguuaugaaagugc

SEQ ID NO: 10638 - RNA, 21 nt, Artificial Sequence
  SAMD9L targeting guide sequence portion
gccaugagaauagagagagag

SEQ ID NO: 10639 - RNA, 21 nt, Artificial Sequence
  SAMD9L targeting guide sequence portion
gcccuauagacaguuaugaug

SEQ ID NO: 10640 - RNA, 21 nt, Artificial Sequence
  SAMD9L targeting guide sequence portion
gccuacccgcagagcuuggca

SEQ ID NO: 10641 - RNA, 21 nt, Artificial Sequence
  SAMD9L targeting guide sequence portion
gccucccugaaugaauuacaa

SEQ ID NO: 10642 - RNA, 21 nt, Artificial Sequence
  SAMD9L targeting guide sequence portion
gccuuuuuaagauaugaaaua

SEQ ID NO: 10643 - RNA, 21 nt, Artificial Sequence
  SAMD9L targeting guide sequence portion
gcggguaggcauauuucauau

SEQ ID NO: 10644 - RNA, 21 nt, Artificial Sequence
  SAMD9L targeting guide sequence portion
gcuaaccucuaauuacagauu

SEQ ID NO: 10645 - RNA, 21 nt, Artificial Sequence
  SAMD9L targeting guide sequence portion
gcucugcggguaggcauauuu

SEQ ID NO: 10646 - RNA, 21 nt, Artificial Sequence
  SAMD9L targeting guide sequence portion
gcugucacagugaagaaauaa

SEQ ID NO: 10647 - RNA, 21 nt, Artificial Sequence
  SAMD9L targeting guide sequence portion
gcuuauuggacucaaacccac

SEQ ID NO: 10648 - RNA, 21 nt, Artificial Sequence
  SAMD9L targeting guide sequence portion
gcuuggcacaaaguggaguca

SEQ ID NO: 10649 - RNA, 21 nt, Artificial Sequence
  SAMD9L targeting guide sequence portion
gcuuguaauucauucagggag

SEQ ID NO: 10650 - RNA, 21 nt, Artificial Sequence
  SAMD9L targeting guide sequence portion
gcuuucucuuuuacauucauc

SEQ ID NO: 10651 - RNA, 21 nt, Artificial Sequence
  SAMD9L targeting guide sequence portion
gcuuuuauaaguuuucuaaau

SEQ ID NO: 10652 - RNA, 21 nt, Artificial Sequence
  SAMD9L targeting guide sequence portion
gcuuuugccucccugaaugaa

SEQ ID NO: 10653 - RNA, 21 nt, Artificial Sequence
  SAMD9L targeting guide sequence portion
ggaagguaaauauauuguucc

SEQ ID NO: 10654 - RNA, 21 nt, Artificial Sequence
  SAMD9L targeting guide sequence portion
ggacucaaacccacagaucca

SEQ ID NO: 10655 - RNA, 21 nt, Artificial Sequence
  SAMD9L targeting guide sequence portion
ggaggcaaaagcaaaaucugu

SEQ ID NO: 10656 - RNA, 21 nt, Artificial Sequence
  SAMD9L targeting guide sequence portion
ggagucaaucuuuuaauguuu

SEQ ID NO: 10657 - RNA, 21 nt, Artificial Sequence
  SAMD9L targeting guide sequence portion
ggauaucaaugaaacuucuua

SEQ ID NO: 10658 - RNA, 21 nt, Artificial Sequence
  SAMD9L targeting guide sequence portion
ggaucuguggguuugagucca

SEQ ID NO: 10659 - RNA, 21 nt, Artificial Sequence
  SAMD9L targeting guide sequence portion
ggauggggaacaauauauuua

SEQ ID NO: 10660 - RNA, 21 nt, Artificial Sequence
  SAMD9L targeting guide sequence portion
ggcaaaagcaaaaucuguaau

SEQ ID NO: 10661 - RNA, 21 nt, Artificial Sequence
  SAMD9L targeting guide sequence portion
ggcaauaaaaucuguguuaaa

SEQ ID NO: 10662 - RNA, 21 nt, Artificial Sequence
  SAMD9L targeting guide sequence portion
ggcacaaaguggagucaaucu

SEQ ID NO: 10663 - RNA, 21 nt, Artificial Sequence
  SAMD9L targeting guide sequence portion
ggcacuuucauaacauuaugg

SEQ ID NO: 10664 - RNA, 21 nt, Artificial Sequence
  SAMD9L targeting guide sequence portion
ggcauauuucauaucuuaaaa

SEQ ID NO: 10665 - RNA, 21 nt, Artificial Sequence
  SAMD9L targeting guide sequence portion
ggcuaaccucuaauuacagau

SEQ ID NO: 10666 - RNA, 21 nt, Artificial Sequence
  SAMD9L targeting guide sequence portion
ggcuuguaauucauucaggga

SEQ ID NO: 10667 - RNA, 21 nt, Artificial Sequence
  SAMD9L targeting guide sequence portion
gggaggcaaaagcaaaaucug

SEQ ID NO: 10668 - RNA, 21 nt, Artificial Sequence
  SAMD9L targeting guide sequence portion
gggcaauaaaaucuguguuaa

SEQ ID NO: 10669 - RNA, 21 nt, Artificial Sequence
  SAMD9L targeting guide sequence portion
ggggaacaauauauuuaccuu

SEQ ID NO: 10670 - RNA, 21 nt, Artificial Sequence
  SAMD9L targeting guide sequence portion
ggguaggcauauuucauaucu

SEQ ID NO: 10671 - RNA, 21 nt, Artificial Sequence
  SAMD9L targeting guide sequence portion
ggguuugaguccaauaagcuu

SEQ ID NO: 10672 - RNA, 21 nt, Artificial Sequence
  SAMD9L targeting guide sequence portion
gguaaauagaacucuggugug

SEQ ID NO: 10673 - RNA, 21 nt, Artificial Sequence
  SAMD9L targeting guide sequence portion
gguaaauauauuguuccccau

SEQ ID NO: 10674 - RNA, 21 nt, Artificial Sequence
  SAMD9L targeting guide sequence portion
gguaggcauauuucauaucuu

SEQ ID NO: 10675 - RNA, 21 nt, Artificial Sequence
  SAMD9L targeting guide sequence portion
ggucacaucauaacugucuau

SEQ ID NO: 10676 - RNA, 21 nt, Artificial Sequence
  SAMD9L targeting guide sequence portion
gguggauggggaacaauauau

SEQ ID NO: 10677 - RNA, 21 nt, Artificial Sequence
  SAMD9L targeting guide sequence portion
gguguggaucuguggguuuga

SEQ ID NO: 10678 - RNA, 21 nt, Artificial Sequence
  SAMD9L targeting guide sequence portion
gguuagccauaauguuaugaa

SEQ ID NO: 10679 - RNA, 21 nt, Artificial Sequence
  SAMD9L targeting guide sequence portion
gguuugaguccaauaagcuuu

SEQ ID NO: 10680 - RNA, 21 nt, Artificial Sequence
  SAMD9L targeting guide sequence portion
guaaaagagaaagcuuauugg

SEQ ID NO: 10681 - RNA, 21 nt, Artificial Sequence
  SAMD9L targeting guide sequence portion
guaaauagaacucuggugugg

SEQ ID NO: 10682 - RNA, 21 nt, Artificial Sequence
  SAMD9L targeting guide sequence portion
guaaauauauuguuccccauc

SEQ ID NO: 10683 - RNA, 21 nt, Artificial Sequence
  SAMD9L targeting guide sequence portion
guaauuagagguuagccauaa

SEQ ID NO: 10684 - RNA, 21 nt, Artificial Sequence
  SAMD9L targeting guide sequence portion
guaauucauucagggaggcaa

SEQ ID NO: 10685 - RNA, 21 nt, Artificial Sequence
  SAMD9L targeting guide sequence portion
guaggcauauuucauaucuua

SEQ ID NO: 10686 - RNA, 21 nt, Artificial Sequence
  SAMD9L targeting guide sequence portion
gucaaucuuuuaauguuuuaa

SEQ ID NO: 10687 - RNA, 21 nt, Artificial Sequence
  SAMD9L targeting guide sequence portion
gucacagugaagaaauaauuu

SEQ ID NO: 10688 - RNA, 21 nt, Artificial Sequence
  SAMD9L targeting guide sequence portion
gucacaucauaacugucuaua

SEQ ID NO: 10689 - RNA, 21 nt, Artificial Sequence
  SAMD9L targeting guide sequence portion
guccaauaagcuuucucuuuu

SEQ ID NO: 10690 - RNA, 21 nt, Artificial Sequence
  SAMD9L targeting guide sequence portion
gucuauagggcaauaaaaucu

SEQ ID NO: 10691 - RNA, 21 nt, Artificial Sequence
  SAMD9L targeting guide sequence portion
gucugaaaaugcauauuuaaa

SEQ ID NO: 10692 - RNA, 21 nt, Artificial Sequence
  SAMD9L targeting guide sequence portion
gugaagaaauaauuuagaaaa

SEQ ID NO: 10693 - RNA, 21 nt, Artificial Sequence
  SAMD9L targeting guide sequence portion
gugacagcaaagauuuaaaua

SEQ ID NO: 10694 - RNA, 21 nt, Artificial Sequence
  SAMD9L targeting guide sequence portion
gugaccaguggauaucaauga

SEQ ID NO: 10695 - RNA, 21 nt, Artificial Sequence
  SAMD9L targeting guide sequence portion
gugccaagcucugcggguagg

SEQ ID NO: 10696 - RNA, 21 nt, Artificial Sequence
  SAMD9L targeting guide sequence portion
gugccaugagaauagagagag

SEQ ID NO: 10697 - RNA, 21 nt, Artificial Sequence
  SAMD9L targeting guide sequence portion
guggaagguaaauauauuguu

SEQ ID NO: 10698 - RNA, 21 nt, Artificial Sequence
  SAMD9L targeting guide sequence portion
guggagucaaucuuuuaaugu

SEQ ID NO: 10699 - RNA, 21 nt, Artificial Sequence
  SAMD9L targeting guide sequence portion
guggauaucaaugaaacuucu

SEQ ID NO: 10700 - RNA, 21 nt, Artificial Sequence
  SAMD9L targeting guide sequence portion
guggaucuguggguuugaguc

SEQ ID NO: 10701 - RNA, 21 nt, Artificial Sequence
  SAMD9L targeting guide sequence portion
guggauggggaacaauauauu

SEQ ID NO: 10702 - RNA, 21 nt, Artificial Sequence
  SAMD9L targeting guide sequence portion
guggguuugaguccaauaagc

SEQ ID NO: 10703 - RNA, 21 nt, Artificial Sequence
  SAMD9L targeting guide sequence portion
gugguggauggggaacaauau

SEQ ID NO: 10704 - RNA, 21 nt, Artificial Sequence
  SAMD9L targeting guide sequence portion
guguggaucuguggguuugag

SEQ ID NO: 10705 - RNA, 21 nt, Artificial Sequence
  SAMD9L targeting guide sequence portion
guguuaaacucaauugcuuuu

SEQ ID NO: 10706 - RNA, 21 nt, Artificial Sequence
  SAMD9L targeting guide sequence portion
guuaaacucaauugcuuuuau

SEQ ID NO: 10707 - RNA, 21 nt, Artificial Sequence
  SAMD9L targeting guide sequence portion
guuagccauaauguuaugaaa

SEQ ID NO: 10708 - RNA, 21 nt, Artificial Sequence
  SAMD9L targeting guide sequence portion
guuaugaaagugccaugagaa

SEQ ID NO: 10709 - RNA, 21 nt, Artificial Sequence
  SAMD9L targeting guide sequence portion
guuaugaugugaccaguggau

SEQ ID NO: 10710 - RNA, 21 nt, Artificial Sequence
  SAMD9L targeting guide sequence portion
guucaaauacguuuauuuaua

SEQ ID NO: 10711 - RNA, 21 nt, Artificial Sequence
  SAMD9L targeting guide sequence portion
guucuauuuaccucaucuugg

SEQ ID NO: 10712 - RNA, 21 nt, Artificial Sequence
  SAMD9L targeting guide sequence portion
guuuaacacagauuuuauugc

SEQ ID NO: 10713 - RNA, 21 nt, Artificial Sequence
  SAMD9L targeting guide sequence portion
guuuauuuauaucuuuaugau

SEQ ID NO: 10714 - RNA, 21 nt, Artificial Sequence
  SAMD9L targeting guide sequence portion
guuucauugauauccacuggu

SEQ ID NO: 10715 - RNA, 21 nt, Artificial Sequence
  SAMD9L targeting guide sequence portion
guuugaguccaauaagcuuuc

SEQ ID NO: 10716 - RNA, 21 nt, Artificial Sequence
  SAMD9L targeting guide sequence portion
guuuuaaauaugcauuuucag

SEQ ID NO: 10717 - RNA, 21 nt, Artificial Sequence
  SAMD9L targeting guide sequence portion
guuuucuaaauuauuucuuca

SEQ ID NO: 10718 - RNA, 21 nt, Artificial Sequence
  SAMD9L targeting guide sequence portion
guuuuuauugauaccaagaug

SEQ ID NO: 10719 - RNA, 21 nt, Artificial Sequence
  SAMD9L targeting guide sequence portion
uaaaaaggcuuguaauucauu

SEQ ID NO: 10720 - RNA, 21 nt, Artificial Sequence
  SAMD9L targeting guide sequence portion
uaaaacauuaaaagauugacu

SEQ ID NO: 10721 - RNA, 21 nt, Artificial Sequence
  SAMD9L targeting guide sequence portion
uaaaagagaaagcuuauugga

SEQ ID NO: 10722 - RNA, 21 nt, Artificial Sequence
  SAMD9L targeting guide sequence portion
uaaaagauugacuccacuuug

SEQ ID NO: 10723 - RNA, 21 nt, Artificial Sequence
  SAMD9L targeting guide sequence portion
uaaaagcaauugaguuuaaca

SEQ ID NO: 10724 - RNA, 21 nt, Artificial Sequence
  SAMD9L targeting guide sequence portion
uaaaaucauaaagauauaaau

SEQ ID NO: 10725 - RNA, 21 nt, Artificial Sequence
  SAMD9L targeting guide sequence portion
uaaaaucuguguuaaacucaa

SEQ ID NO: 10726 - RNA, 21 nt, Artificial Sequence
  SAMD9L targeting guide sequence portion
uaaacucaauugcuuuuauaa

SEQ ID NO: 10727 - RNA, 21 nt, Artificial Sequence
  SAMD9L targeting guide sequence portion
uaaagauauaaauaaacguau

SEQ ID NO: 10728 - RNA, 21 nt, Artificial Sequence
  SAMD9L targeting guide sequence portion
uaaauaaacguauuugaacua

SEQ ID NO: 10729 - RNA, 21 nt, Artificial Sequence
  SAMD9L targeting guide sequence portion
uaaauaagaugaauguaaaag

SEQ ID NO: 10730 - RNA, 21 nt, Artificial Sequence
  SAMD9L targeting guide sequence portion
uaaauagaacucuggugugga

SEQ ID NO: 10731 - RNA, 21 nt, Artificial Sequence
  SAMD9L targeting guide sequence portion
uaaauauauuguuccccaucc

SEQ ID NO: 10732 - RNA, 21 nt, Artificial Sequence
  SAMD9L targeting guide sequence portion
uaaauaugcauuuucagacuc

SEQ ID NO: 10733 - RNA, 21 nt, Artificial Sequence
  SAMD9L targeting guide sequence portion
uaaaucuuugcugucacagug

SEQ ID NO: 10734 - RNA, 21 nt, Artificial Sequence
  SAMD9L targeting guide sequence portion
uaaauuauuucuucacuguga

SEQ ID NO: 10735 - RNA, 21 nt, Artificial Sequence
  SAMD9L targeting guide sequence portion
uaacacagauuuuauugcccu

SEQ ID NO: 10736 - RNA, 21 nt, Artificial Sequence
  SAMD9L targeting guide sequence portion
uaacauuauggcuaaccucua

SEQ ID NO: 10737 - RNA, 21 nt, Artificial Sequence
  SAMD9L targeting guide sequence portion
uaaccucuaauuacagauuuu

SEQ ID NO: 10738 - RNA, 21 nt, Artificial Sequence
  SAMD9L targeting guide sequence portion
uaacugucuauagggcaauaa

SEQ ID NO: 10739 - RNA, 21 nt, Artificial Sequence
  SAMD9L targeting guide sequence portion
uaagaaguuucauugauaucc

SEQ ID NO: 10740 - RNA, 21 nt, Artificial Sequence
  SAMD9L targeting guide sequence portion
uaagauaugaaauaugccuac

SEQ ID NO: 10741 - RNA, 21 nt, Artificial Sequence
  SAMD9L targeting guide sequence portion
uaagaugaauguaaaagagaa

SEQ ID NO: 10742 - RNA, 21 nt, Artificial Sequence
  SAMD9L targeting guide sequence portion
uaagcuuucucuuuuacauuc

SEQ ID NO: 10743 - RNA, 21 nt, Artificial Sequence
  SAMD9L targeting guide sequence portion
uaaguuuucuaaauuauuucu

SEQ ID NO: 10744 - RNA, 21 nt, Artificial Sequence
  SAMD9L targeting guide sequence portion
uaauguuaugaaagugccaug

SEQ ID NO: 10745 - RNA, 21 nt, Artificial Sequence
  SAMD9L targeting guide sequence portion
uaauguuuuaaauaugcauuu

SEQ ID NO: 10746 - RNA, 21 nt, Artificial Sequence
  SAMD9L targeting guide sequence portion
uaauuaagaaguuucauugau

SEQ ID NO: 10747 - RNA, 21 nt, Artificial Sequence
  SAMD9L targeting guide sequence portion
uaauuacagauuuugcuuuug

SEQ ID NO: 10748 - RNA, 21 nt, Artificial Sequence
  SAMD9L targeting guide sequence portion
uaauuagagguuagccauaau

SEQ ID NO: 10749 - RNA, 21 nt, Artificial Sequence
  SAMD9L targeting guide sequence portion
uaauuauuugagucugaaaau

SEQ ID NO: 10750 - RNA, 21 nt, Artificial Sequence
  SAMD9L targeting guide sequence portion
uaauucauucagggaggcaaa

SEQ ID NO: 10751 - RNA, 21 nt, Artificial Sequence
  SAMD9L targeting guide sequence portion
uaauuuagaaaacuuauaaaa

SEQ ID NO: 10752 - RNA, 21 nt, Artificial Sequence
  SAMD9L targeting guide sequence portion
uacaagccuuuuuaagauaug

SEQ ID NO: 10753 - RNA, 21 nt, Artificial Sequence
  SAMD9L targeting guide sequence portion
uacagauuuugcuuuugccuc

SEQ ID NO: 10754 - RNA, 21 nt, Artificial Sequence
  SAMD9L targeting guide sequence portion
uacauucaucuuauuuaaauc

SEQ ID NO: 10755 - RNA, 21 nt, Artificial Sequence
  SAMD9L targeting guide sequence portion
uaccaagaugagguaaauaga

SEQ ID NO: 10756 - RNA, 21 nt, Artificial Sequence
  SAMD9L targeting guide sequence portion
uacccgcagagcuuggcacaa

SEQ ID NO: 10757 - RNA, 21 nt, Artificial Sequence
  SAMD9L targeting guide sequence portion
uaccucaucuugguaucaaua

SEQ ID NO: 10758 - RNA, 21 nt, Artificial Sequence
  SAMD9L targeting guide sequence portion
uacguuuauuuauaucuuuau

SEQ ID NO: 10759 - RNA, 21 nt, Artificial Sequence
  SAMD9L targeting guide sequence portion
uagaaaacuuauaaaagcaau

SEQ ID NO: 10760 - RNA, 21 nt, Artificial Sequence
  SAMD9L targeting guide sequence portion
uagaacucugguguggaucug

SEQ ID NO: 10761 - RNA, 21 nt, Artificial Sequence
  SAMD9L targeting guide sequence portion
uagacaguuaugaugugacca

SEQ ID NO: 10762 - RNA, 21 nt, Artificial Sequence
  SAMD9L targeting guide sequence portion
uagagagagagaauaaaauca

SEQ ID NO: 10763 - RNA, 21 nt, Artificial Sequence
  SAMD9L targeting guide sequence portion
uagagguuagccauaauguua

SEQ ID NO: 10764 - RNA, 21 nt, Artificial Sequence
  SAMD9L targeting guide sequence portion
uagccauaauguuaugaaagu

SEQ ID NO: 10765 - RNA, 21 nt, Artificial Sequence
  SAMD9L targeting guide sequence portion
uaggcauauuucauaucuuaa

SEQ ID NO: 10766 - RNA, 21 nt, Artificial Sequence
  SAMD9L targeting guide sequence portion
uagggcaauaaaaucuguguu

SEQ ID NO: 10767 - RNA, 21 nt, Artificial Sequence
  SAMD9L targeting guide sequence portion
uaguucaaauacguuuauuua

SEQ ID NO: 10768 - RNA, 21 nt, Artificial Sequence
  SAMD9L targeting guide sequence portion
uauaaaagcaauugaguuuaa

SEQ ID NO: 10769 - RNA, 21 nt, Artificial Sequence
  SAMD9L targeting guide sequence portion
uauaaauaaacguauuugaac

SEQ ID NO: 10770 - RNA, 21 nt, Artificial Sequence
  SAMD9L targeting guide sequence portion
uauaaguuuucuaaauuauuu

SEQ ID NO: 10771 - RNA, 21 nt, Artificial Sequence
  SAMD9L targeting guide sequence portion
uauagacaguuaugaugugac

SEQ ID NO: 10772 - RNA, 21 nt, Artificial Sequence
  SAMD9L targeting guide sequence portion
uauagggcaauaaaaucugug

SEQ ID NO: 10773 - RNA, 21 nt, Artificial Sequence
  SAMD9L targeting guide sequence portion
uauaucuuuaugauuuuauuc

SEQ ID NO: 10774 - RNA, 21 nt, Artificial Sequence
  SAMD9L targeting guide sequence portion
uaucaaugaaacuucuuaauu

SEQ ID NO: 10775 - RNA, 21 nt, Artificial Sequence
  SAMD9L targeting guide sequence portion
uauccacuggucacaucauaa

SEQ ID NO: 10776 - RNA, 21 nt, Artificial Sequence
  SAMD9L targeting guide sequence portion
uaucuuaaaaaggcuuguaau

SEQ ID NO: 10777 - RNA, 21 nt, Artificial Sequence
  SAMD9L targeting guide sequence portion
uaucuuuaugauuuuauucuc

SEQ ID NO: 10778 - RNA, 21 nt, Artificial Sequence
  SAMD9L targeting guide sequence portion
uaugaaagugccaugagaaua

SEQ ID NO: 10779 - RNA, 21 nt, Artificial Sequence
  SAMD9L targeting guide sequence portion
uaugaaauaugccuacccgca

SEQ ID NO: 10780 - RNA, 21 nt, Artificial Sequence
  SAMD9L targeting guide sequence portion
uaugaugugaccaguggauau

SEQ ID NO: 10781 - RNA, 21 nt, Artificial Sequence
  SAMD9L targeting guide sequence portion
uaugauuuuauucucucucuc

SEQ ID NO: 10782 - RNA, 21 nt, Artificial Sequence
  SAMD9L targeting guide sequence portion
uaugcauuuucagacucaaau

SEQ ID NO: 10783 - RNA, 21 nt, Artificial Sequence
  SAMD9L targeting guide sequence portion
uaugccuacccgcagagcuug

SEQ ID NO: 10784 - RNA, 21 nt, Artificial Sequence
  SAMD9L targeting guide sequence portion
uauggcuaaccucuaauuaca

SEQ ID NO: 10785 - RNA, 21 nt, Artificial Sequence
  SAMD9L targeting guide sequence portion
uaugugguggauggggaacaa

SEQ ID NO: 10786 - RNA, 21 nt, Artificial Sequence
  SAMD9L targeting guide sequence portion
uauucucauggcacuuucaua

SEQ ID NO: 10787 - RNA, 21 nt, Artificial Sequence
  SAMD9L targeting guide sequence portion
uauucucucucucuauucuca

SEQ ID NO: 10788 - RNA, 21 nt, Artificial Sequence
  SAMD9L targeting guide sequence portion
uauugauaccaagaugaggua

SEQ ID NO: 10789 - RNA, 21 nt, Artificial Sequence
  SAMD9L targeting guide sequence portion
uauugcccuauagacaguuau

SEQ ID NO: 10790 - RNA, 21 nt, Artificial Sequence
  SAMD9L targeting guide sequence portion
uauuggacucaaacccacaga

SEQ ID NO: 10791 - RNA, 21 nt, Artificial Sequence
  SAMD9L targeting guide sequence portion
uauuuaaaacauuaaaagauu

SEQ ID NO: 10792 - RNA, 21 nt, Artificial Sequence
  SAMD9L targeting guide sequence portion
uauuuaaaucuuugcugucac

SEQ ID NO: 10793 - RNA, 21 nt, Artificial Sequence
  SAMD9L targeting guide sequence portion
uauuuaccucaucuugguauc

SEQ ID NO: 10794 - RNA, 21 nt, Artificial Sequence
  SAMD9L targeting guide sequence portion
uauuuauaucuuuaugauuuu

SEQ ID NO: 10795 - RNA, 21 nt, Artificial Sequence
  SAMD9L targeting guide sequence portion
uauuucauaucuuaaaaaggc

SEQ ID NO: 10796 - RNA, 21 nt, Artificial Sequence
  SAMD9L targeting guide sequence portion
uauuucuucacugugacagca

SEQ ID NO: 10797 - RNA, 21 nt, Artificial Sequence
  SAMD9L targeting guide sequence portion
uauuugaacuacaggugaugu

SEQ ID NO: 10798 - RNA, 21 nt, Artificial Sequence
  SAMD9L targeting guide sequence portion
uauuugagucugaaaaugcau

SEQ ID NO: 10799 - RNA, 21 nt, Artificial Sequence
  SAMD9L targeting guide sequence portion
ucaaacccacagauccacacc

SEQ ID NO: 10800 - RNA, 21 nt, Artificial Sequence
  SAMD9L targeting guide sequence portion
ucaaauaauuaagaaguuuca

SEQ ID NO: 10801 - RNA, 21 nt, Artificial Sequence
  SAMD9L targeting guide sequence portion
ucaaauacguuuauuuauauc

SEQ ID NO: 10802 - RNA, 21 nt, Artificial Sequence
  SAMD9L targeting guide sequence portion
ucaaucuuuuaauguuuuaaa

SEQ ID NO: 10803 - RNA, 21 nt, Artificial Sequence
  SAMD9L targeting guide sequence portion
ucaaugaaacuucuuaauuau

SEQ ID NO: 10804 - RNA, 21 nt, Artificial Sequence
  SAMD9L targeting guide sequence portion
ucaauugcuuuuauaaguuuu

SEQ ID NO: 10805 - RNA, 21 nt, Artificial Sequence
  SAMD9L targeting guide sequence portion
ucacagugaagaaauaauuua

SEQ ID NO: 10806 - RNA, 21 nt, Artificial Sequence
  SAMD9L targeting guide sequence portion
ucacaucauaacugucuauag

SEQ ID NO: 10807 - RNA, 21 nt, Artificial Sequence
  SAMD9L targeting guide sequence portion
ucacugugacagcaaagauuu

SEQ ID NO: 10808 - RNA, 21 nt, Artificial Sequence
  SAMD9L targeting guide sequence portion
ucagacucaaauaauuaagaa

SEQ ID NO: 10809 - RNA, 21 nt, Artificial Sequence
  SAMD9L targeting guide sequence portion
ucagggaggcaaaagcaaaau

SEQ ID NO: 10810 - RNA, 21 nt, Artificial Sequence
  SAMD9L targeting guide sequence portion
ucauaaagauauaaauaaacg

SEQ ID NO: 10811 - RNA, 21 nt, Artificial Sequence
  SAMD9L targeting guide sequence portion
ucauaacauuauggcuaaccu

SEQ ID NO: 10812 - RNA, 21 nt, Artificial Sequence
  SAMD9L targeting guide sequence portion
ucauaacugucuauagggcaa

SEQ ID NO: 10813 - RNA, 21 nt, Artificial Sequence
  SAMD9L targeting guide sequence portion
ucauaucuuaaaaaggcuugu

SEQ ID NO: 10814 - RNA, 21 nt, Artificial Sequence
  SAMD9L targeting guide sequence portion
ucaucuuauuuaaaucuuugc

SEQ ID NO: 10815 - RNA, 21 nt, Artificial Sequence
  SAMD9L targeting guide sequence portion
ucauggcacuuucauaacauu

SEQ ID NO: 10816 - RNA, 21 nt, Artificial Sequence
  SAMD9L targeting guide sequence portion
ucauucagggaggcaaaagca

SEQ ID NO: 10817 - RNA, 21 nt, Artificial Sequence
  SAMD9L targeting guide sequence portion
ucauugauauccacuggucac

SEQ ID NO: 10818 - RNA, 21 nt, Artificial Sequence
  SAMD9L targeting guide sequence portion
uccaauaagcuuucucuuuua

SEQ ID NO: 10819 - RNA, 21 nt, Artificial Sequence
  SAMD9L targeting guide sequence portion
uccacaccagaguucuauuua

SEQ ID NO: 10820 - RNA, 21 nt, Artificial Sequence
  SAMD9L targeting guide sequence portion
uccacuggucacaucauaacu

SEQ ID NO: 10821 - RNA, 21 nt, Artificial Sequence
  SAMD9L targeting guide sequence portion
uccacuuugugccaagcucug

SEQ ID NO: 10822 - RNA, 21 nt, Artificial Sequence
  SAMD9L targeting guide sequence portion
ucccugaaugaauuacaagcc

SEQ ID NO: 10823 - RNA, 21 nt, Artificial Sequence
  SAMD9L targeting guide sequence portion
ucuaaauuauuucuucacugu

SEQ ID NO: 10824 - RNA, 21 nt, Artificial Sequence
  SAMD9L targeting guide sequence portion
ucuaauuacagauuuugcuuu

SEQ ID NO: 10825 - RNA, 21 nt, Artificial Sequence
  SAMD9L targeting guide sequence portion
ucuauagggcaauaaaaucug

SEQ ID NO: 10826 - RNA, 21 nt, Artificial Sequence
  SAMD9L targeting guide sequence portion
ucuauucucauggcacuuuca

SEQ ID NO: 10827 - RNA, 21 nt, Artificial Sequence
  SAMD9L targeting guide sequence portion
ucuauuuaccucaucuuggua

SEQ ID NO: 10828 - RNA, 21 nt, Artificial Sequence
  SAMD9L targeting guide sequence portion
ucucauggcacuuucauaaca

SEQ ID NO: 10829 - RNA, 21 nt, Artificial Sequence
  SAMD9L targeting guide sequence portion
ucucuauucucauggcacuuu

SEQ ID NO: 10830 - RNA, 21 nt, Artificial Sequence
  SAMD9L targeting guide sequence portion
ucucucuauucucauggcacu

SEQ ID NO: 10831 - RNA, 21 nt, Artificial Sequence
  SAMD9L targeting guide sequence portion
ucucucucuauucucauggca

SEQ ID NO: 10832 - RNA, 21 nt, Artificial Sequence
  SAMD9L targeting guide sequence portion
ucucucucucuauucucaugg

SEQ ID NO: 10833 - RNA, 21 nt, Artificial Sequence
  SAMD9L targeting guide sequence portion
ucucuuuuacauucaucuuau

SEQ ID NO: 10834 - RNA, 21 nt, Artificial Sequence
  SAMD9L targeting guide sequence portion
ucugaaaaugcauauuuaaaa

SEQ ID NO: 10835 - RNA, 21 nt, Artificial Sequence
  SAMD9L targeting guide sequence portion
ucugcggguaggcauauuuca

SEQ ID NO: 10836 - RNA, 21 nt, Artificial Sequence
  SAMD9L targeting guide sequence portion
ucugguguggaucuguggguu

SEQ ID NO: 10837 - RNA, 21 nt, Artificial Sequence
  SAMD9L targeting guide sequence portion
ucuguaauuagagguuagcca

SEQ ID NO: 10838 - RNA, 21 nt, Artificial Sequence
  SAMD9L targeting guide sequence portion
ucuguggguuugaguccaaua

SEQ ID NO: 10839 - RNA, 21 nt, Artificial Sequence
  SAMD9L targeting guide sequence portion
ucuguguuaaacucaauugcu

SEQ ID NO: 10840 - RNA, 21 nt, Artificial Sequence
  SAMD9L targeting guide sequence portion
ucuuaaaaaggcuuguaauuc

SEQ ID NO: 10841 - RNA, 21 nt, Artificial Sequence
  SAMD9L targeting guide sequence portion
ucuuaauuauuugagucugaa

SEQ ID NO: 10842 - RNA, 21 nt, Artificial Sequence
  SAMD9L targeting guide sequence portion
ucuuauuuaaaucuuugcugu

SEQ ID NO: 10843 - RNA, 21 nt, Artificial Sequence
  SAMD9L targeting guide sequence portion
ucuucacugugacagcaaaga

SEQ ID NO: 10844 - RNA, 21 nt, Artificial Sequence
  SAMD9L targeting guide sequence portion
ucuuuaugauuuuauucucuc

SEQ ID NO: 10845 - RNA, 21 nt, Artificial Sequence
  SAMD9L targeting guide sequence portion
ucuuugcugucacagugaaga

SEQ ID NO: 10846 - RNA, 21 nt, Artificial Sequence
  SAMD9L targeting guide sequence portion
ucuuuuaauguuuuaaauaug

SEQ ID NO: 10847 - RNA, 21 nt, Artificial Sequence
  SAMD9L targeting guide sequence portion
ucuuuuacauucaucuuauuu

SEQ ID NO: 10848 - RNA, 21 nt, Artificial Sequence
  SAMD9L targeting guide sequence portion
ugaaaaugcauauuuaaaaca

SEQ ID NO: 10849 - RNA, 21 nt, Artificial Sequence
  SAMD9L targeting guide sequence portion
ugaaacuucuuaauuauuuga

SEQ ID NO: 10850 - RNA, 21 nt, Artificial Sequence
  SAMD9L targeting guide sequence portion
ugaaagugccaugagaauaga

SEQ ID NO: 10851 - RNA, 21 nt, Artificial Sequence
  SAMD9L targeting guide sequence portion
ugaaauaugccuacccgcaga

SEQ ID NO: 10852 - RNA, 21 nt, Artificial Sequence
  SAMD9L targeting guide sequence portion
ugaagaaauaauuuagaaaac

SEQ ID NO: 10853 - RNA, 21 nt, Artificial Sequence
  SAMD9L targeting guide sequence portion
ugaaugaauuacaagccuuuu

SEQ ID NO: 10854 - RNA, 21 nt, Artificial Sequence
  SAMD9L targeting guide sequence portion
ugaauguaaaagagaaagcuu

SEQ ID NO: 10855 - RNA, 21 nt, Artificial Sequence
  SAMD9L targeting guide sequence portion
ugaauuacaagccuuuuuaag

SEQ ID NO: 10856 - RNA, 21 nt, Artificial Sequence
  SAMD9L targeting guide sequence portion
ugacagcaaagauuuaaauaa

SEQ ID NO: 10857 - RNA, 21 nt, Artificial Sequence
  SAMD9L targeting guide sequence portion
ugaccaguggauaucaaugaa

SEQ ID NO: 10858 - RNA, 21 nt, Artificial Sequence
  SAMD9L targeting guide sequence portion
ugacuccacuuugugccaagc

SEQ ID NO: 10859 - RNA, 21 nt, Artificial Sequence
  SAMD9L targeting guide sequence portion
ugagaauagagagagagaaua

SEQ ID NO: 10860 - RNA, 21 nt, Artificial Sequence
  SAMD9L targeting guide sequence portion
ugagguaaauagaacucuggu

SEQ ID NO: 10861 - RNA, 21 nt, Artificial Sequence
  SAMD9L targeting guide sequence portion
ugaguccaauaagcuuucucu

SEQ ID NO: 10862 - RNA, 21 nt, Artificial Sequence
  SAMD9L targeting guide sequence portion
ugagucugaaaaugcauauuu

SEQ ID NO: 10863 - RNA, 21 nt, Artificial Sequence
  SAMD9L targeting guide sequence portion
ugaguuuaacacagauuuuau

SEQ ID NO: 10864 - RNA, 21 nt, Artificial Sequence
  SAMD9L targeting guide sequence portion
ugauaccaagaugagguaaau

SEQ ID NO: 10865 - RNA, 21 nt, Artificial Sequence
  SAMD9L targeting guide sequence portion
ugauauccacuggucacauca

SEQ ID NO: 10866 - RNA, 21 nt, Artificial Sequence
  SAMD9L targeting guide sequence portion
ugaugugaccaguggauauca

SEQ ID NO: 10867 - RNA, 21 nt, Artificial Sequence
  SAMD9L targeting guide sequence portion
ugauuuuauucucucucucua

SEQ ID NO: 10868 - RNA, 21 nt, Artificial Sequence
  SAMD9L targeting guide sequence portion
ugcauauuuaaaacauuaaaa

SEQ ID NO: 10869 - RNA, 21 nt, Artificial Sequence
  SAMD9L targeting guide sequence portion
ugcauuuucagacucaaauaa

SEQ ID NO: 10870 - RNA, 21 nt, Artificial Sequence
  SAMD9L targeting guide sequence portion
ugccaagcucugcggguaggc

SEQ ID NO: 10871 - RNA, 21 nt, Artificial Sequence
  SAMD9L targeting guide sequence portion
ugccaugagaauagagagaga

SEQ ID NO: 10872 - RNA, 21 nt, Artificial Sequence
  SAMD9L targeting guide sequence portion
ugcccuauagacaguuaugau

SEQ ID NO: 10873 - RNA, 21 nt, Artificial Sequence
  SAMD9L targeting guide sequence portion
ugccuacccgcagagcuuggc

SEQ ID NO: 10874 - RNA, 21 nt, Artificial Sequence
  SAMD9L targeting guide sequence portion
ugccucccugaaugaauuaca

SEQ ID NO: 10875 - RNA, 21 nt, Artificial Sequence
  SAMD9L targeting guide sequence portion
ugcggguaggcauauuucaua

SEQ ID NO: 10876 - RNA, 21 nt, Artificial Sequence
  SAMD9L targeting guide sequence portion
ugcugucacagugaagaaaua

SEQ ID NO: 10877 - RNA, 21 nt, Artificial Sequence
  SAMD9L targeting guide sequence portion
ugcuuuuauaaguuuucuaaa

SEQ ID NO: 10878 - RNA, 21 nt, Artificial Sequence
  SAMD9L targeting guide sequence portion
ugcuuuugccucccugaauga

SEQ ID NO: 10879 - RNA, 21 nt, Artificial Sequence
  SAMD9L targeting guide sequence portion
uggaagguaaauauauuguuc

SEQ ID NO: 10880 - RNA, 21 nt, Artificial Sequence
  SAMD9L targeting guide sequence portion
uggacucaaacccacagaucc

SEQ ID NO: 10881 - RNA, 21 nt, Artificial Sequence
  SAMD9L targeting guide sequence portion
uggagucaaucuuuuaauguu

SEQ ID NO: 10882 - RNA, 21 nt, Artificial Sequence
  SAMD9L targeting guide sequence portion
uggauaucaaugaaacuucuu

SEQ ID NO: 10883 - RNA, 21 nt, Artificial Sequence
  SAMD9L targeting guide sequence portion
uggaucuguggguuugagucc

SEQ ID NO: 10884 - RNA, 21 nt, Artificial Sequence
  SAMD9L targeting guide sequence portion
uggauggggaacaauauauuu

SEQ ID NO: 10885 - RNA, 21 nt, Artificial Sequence
  SAMD9L targeting guide sequence portion
uggcacaaaguggagucaauc

SEQ ID NO: 10886 - RNA, 21 nt, Artificial Sequence
  SAMD9L targeting guide sequence portion
uggcacuuucauaacauuaug

SEQ ID NO: 10887 - RNA, 21 nt, Artificial Sequence
  SAMD9L targeting guide sequence portion
uggcuaaccucuaauuacaga

SEQ ID NO: 10888 - RNA, 21 nt, Artificial Sequence
  SAMD9L targeting guide sequence portion
uggggaacaauauauuuaccu

SEQ ID NO: 10889 - RNA, 21 nt, Artificial Sequence
  SAMD9L targeting guide sequence portion
uggguuugaguccaauaagcu

SEQ ID NO: 10890 - RNA, 21 nt, Artificial Sequence
  SAMD9L targeting guide sequence portion
uggucacaucauaacugucua

SEQ ID NO: 10891 - RNA, 21 nt, Artificial Sequence
  SAMD9L targeting guide sequence portion
ugguggauggggaacaauaua

SEQ ID NO: 10892 - RNA, 21 nt, Artificial Sequence
  SAMD9L targeting guide sequence portion
ugguguggaucuguggguuug

SEQ ID NO: 10893 - RNA, 21 nt, Artificial Sequence
  SAMD9L targeting guide sequence portion
uguaaaagagaaagcuuauug

SEQ ID NO: 10894 - RNA, 21 nt, Artificial Sequence
  SAMD9L targeting guide sequence portion
uguaauuagagguuagccaua

SEQ ID NO: 10895 - RNA, 21 nt, Artificial Sequence
  SAMD9L targeting guide sequence portion
uguaauucauucagggaggca

SEQ ID NO: 10896 - RNA, 21 nt, Artificial Sequence
  SAMD9L targeting guide sequence portion
ugucacagugaagaaauaauu

SEQ ID NO: 10897 - RNA, 21 nt, Artificial Sequence
  SAMD9L targeting guide sequence portion
ugucuauagggcaauaaaauc

SEQ ID NO: 10898 - RNA, 21 nt, Artificial Sequence
  SAMD9L targeting guide sequence portion
ugugacagcaaagauuuaaau

SEQ ID NO: 10899 - RNA, 21 nt, Artificial Sequence
  SAMD9L targeting guide sequence portion
ugugaccaguggauaucaaug

SEQ ID NO: 10900 - RNA, 21 nt, Artificial Sequence
  SAMD9L targeting guide sequence portion
ugugccaagcucugcggguag

SEQ ID NO: 10901 - RNA, 21 nt, Artificial Sequence
  SAMD9L targeting guide sequence portion
uguggaagguaaauauauugu

SEQ ID NO: 10902 - RNA, 21 nt, Artificial Sequence
  SAMD9L targeting guide sequence portion
uguggaucuguggguuugagu

SEQ ID NO: 10903 - RNA, 21 nt, Artificial Sequence
  SAMD9L targeting guide sequence portion
uguggguuugaguccaauaag

SEQ ID NO: 10904 - RNA, 21 nt, Artificial Sequence
  SAMD9L targeting guide sequence portion
ugugguggauggggaacaaua

SEQ ID NO: 10905 - RNA, 21 nt, Artificial Sequence
  SAMD9L targeting guide sequence portion
uguguuaaacucaauugcuuu

SEQ ID NO: 10906 - RNA, 21 nt, Artificial Sequence
  SAMD9L targeting guide sequence portion
uguuaaacucaauugcuuuua

SEQ ID NO: 10907 - RNA, 21 nt, Artificial Sequence
  SAMD9L targeting guide sequence portion
uguuaugaaagugccaugaga

SEQ ID NO: 10908 - RNA, 21 nt, Artificial Sequence
  SAMD9L targeting guide sequence portion
uguuuuaaauaugcauuuuca

SEQ ID NO: 10909 - RNA, 21 nt, Artificial Sequence
  SAMD9L targeting guide sequence portion
uuaaaaaggcuuguaauucau

SEQ ID NO: 10910 - RNA, 21 nt, Artificial Sequence
  SAMD9L targeting guide sequence portion
uuaaaacauuaaaagauugac

SEQ ID NO: 10911 - RNA, 21 nt, Artificial Sequence
  SAMD9L targeting guide sequence portion
uuaaaagauugacuccacuuu

SEQ ID NO: 10912 - RNA, 21 nt, Artificial Sequence
  SAMD9L targeting guide sequence portion
uuaaacucaauugcuuuuaua

SEQ ID NO: 10913 - RNA, 21 nt, Artificial Sequence
  SAMD9L targeting guide sequence portion
uuaaauaagaugaauguaaaa

SEQ ID NO: 10914 - RNA, 21 nt, Artificial Sequence
  SAMD9L targeting guide sequence portion
uuaaauaugcauuuucagacu

SEQ ID NO: 10915 - RNA, 21 nt, Artificial Sequence
  SAMD9L targeting guide sequence portion
uuaaaucuuugcugucacagu

SEQ ID NO: 10916 - RNA, 21 nt, Artificial Sequence
  SAMD9L targeting guide sequence portion
uuaacacagauuuuauugccc

SEQ ID NO: 10917 - RNA, 21 nt, Artificial Sequence
  SAMD9L targeting guide sequence portion
uuaagaaguuucauugauauc

SEQ ID NO: 10918 - RNA, 21 nt, Artificial Sequence
  SAMD9L targeting guide sequence portion
uuaagauaugaaauaugccua

SEQ ID NO: 10919 - RNA, 21 nt, Artificial Sequence
  SAMD9L targeting guide sequence portion
uuaauguuuuaaauaugcauu

SEQ ID NO: 10920 - RNA, 21 nt, Artificial Sequence
  SAMD9L targeting guide sequence portion
uuaauuauuugagucugaaaa

SEQ ID NO: 10921 - RNA, 21 nt, Artificial Sequence
  SAMD9L targeting guide sequence portion
uuacaagccuuuuuaagauau

SEQ ID NO: 10922 - RNA, 21 nt, Artificial Sequence
  SAMD9L targeting guide sequence portion
uuacagauuuugcuuuugccu

SEQ ID NO: 10923 - RNA, 21 nt, Artificial Sequence
  SAMD9L targeting guide sequence portion
uuacauucaucuuauuuaaau

SEQ ID NO: 10924 - RNA, 21 nt, Artificial Sequence
  SAMD9L targeting guide sequence portion
uuaccucaucuugguaucaau

SEQ ID NO: 10925 - RNA, 21 nt, Artificial Sequence
  SAMD9L targeting guide sequence portion
uuagaaaacuuauaaaagcaa

SEQ ID NO: 10926 - RNA, 21 nt, Artificial Sequence
  SAMD9L targeting guide sequence portion
uuagagguuagccauaauguu

SEQ ID NO: 10927 - RNA, 21 nt, Artificial Sequence
  SAMD9L targeting guide sequence portion
uuagccauaauguuaugaaag

SEQ ID NO: 10928 - RNA, 21 nt, Artificial Sequence
  SAMD9L targeting guide sequence portion
uuauaaaagcaauugaguuua

SEQ ID NO: 10929 - RNA, 21 nt, Artificial Sequence
  SAMD9L targeting guide sequence portion
uuauaaguuuucuaaauuauu

SEQ ID NO: 10930 - RNA, 21 nt, Artificial Sequence
  SAMD9L targeting guide sequence portion
uuauaucuuuaugauuuuauu

SEQ ID NO: 10931 - RNA, 21 nt, Artificial Sequence
  SAMD9L targeting guide sequence portion
uuaugaaagugccaugagaau

SEQ ID NO: 10932 - RNA, 21 nt, Artificial Sequence
  SAMD9L targeting guide sequence portion
uuaugaugugaccaguggaua

SEQ ID NO: 10933 - RNA, 21 nt, Artificial Sequence
  SAMD9L targeting guide sequence portion
uuaugauuuuauucucucucu

SEQ ID NO: 10934 - RNA, 21 nt, Artificial Sequence
  SAMD9L targeting guide sequence portion
uuauggcuaaccucuaauuac

SEQ ID NO: 10935 - RNA, 21 nt, Artificial Sequence
  SAMD9L targeting guide sequence portion
uuauucucucucucuauucuc

SEQ ID NO: 10936 - RNA, 21 nt, Artificial Sequence
  SAMD9L targeting guide sequence portion
uuauugauaccaagaugaggu

SEQ ID NO: 10937 - RNA, 21 nt, Artificial Sequence
  SAMD9L targeting guide sequence portion
uuauugcccuauagacaguua

SEQ ID NO: 10938 - RNA, 21 nt, Artificial Sequence
  SAMD9L targeting guide sequence portion
uuauuggacucaaacccacag

SEQ ID NO: 10939 - RNA, 21 nt, Artificial Sequence
  SAMD9L targeting guide sequence portion
uuauuuaaaucuuugcuguca

SEQ ID NO: 10940 - RNA, 21 nt, Artificial Sequence
  SAMD9L targeting guide sequence portion
uuauuuauaucuuuaugauuu

SEQ ID NO: 10941 - RNA, 21 nt, Artificial Sequence
  SAMD9L targeting guide sequence portion
uuauuucuucacugugacagc

SEQ ID NO: 10942 - RNA, 21 nt, Artificial Sequence
  SAMD9L targeting guide sequence portion
uuauuugagucugaaaaugca

SEQ ID NO: 10943 - RNA, 21 nt, Artificial Sequence
  SAMD9L targeting guide sequence portion
uucaaauacguuuauuuauau

SEQ ID NO: 10944 - RNA, 21 nt, Artificial Sequence
  SAMD9L targeting guide sequence portion
uucacugugacagcaaagauu

SEQ ID NO: 10945 - RNA, 21 nt, Artificial Sequence
  SAMD9L targeting guide sequence portion
uucagacucaaauaauuaaga

SEQ ID NO: 10946 - RNA, 21 nt, Artificial Sequence
  SAMD9L targeting guide sequence portion
uucagggaggcaaaagcaaaa

SEQ ID NO: 10947 - RNA, 21 nt, Artificial Sequence
  SAMD9L targeting guide sequence portion
uucauaacauuauggcuaacc

SEQ ID NO: 10948 - RNA, 21 nt, Artificial Sequence
  SAMD9L targeting guide sequence portion
uucauaucuuaaaaaggcuug

SEQ ID NO: 10949 - RNA, 21 nt, Artificial Sequence
  SAMD9L targeting guide sequence portion
uucaucuuauuuaaaucuuug

SEQ ID NO: 10950 - RNA, 21 nt, Artificial Sequence
  SAMD9L targeting guide sequence portion
uucauucagggaggcaaaagc

SEQ ID NO: 10951 - RNA, 21 nt, Artificial Sequence
  SAMD9L targeting guide sequence portion
uucauugauauccacugguca

SEQ ID NO: 10952 - RNA, 21 nt, Artificial Sequence
  SAMD9L targeting guide sequence portion
uucuaaauuauuucuucacug

SEQ ID NO: 10953 - RNA, 21 nt, Artificial Sequence
  SAMD9L targeting guide sequence portion
uucuauuuaccucaucuuggu

SEQ ID NO: 10954 - RNA, 21 nt, Artificial Sequence
  SAMD9L targeting guide sequence portion
uucucauggcacuuucauaac

SEQ ID NO: 10955 - RNA, 21 nt, Artificial Sequence
  SAMD9L targeting guide sequence portion
uucucucucucuauucucaug

SEQ ID NO: 10956 - RNA, 21 nt, Artificial Sequence
  SAMD9L targeting guide sequence portion
uucucuuuuacauucaucuua

SEQ ID NO: 10957 - RNA, 21 nt, Artificial Sequence
  SAMD9L targeting guide sequence portion
uucuuaauuauuugagucuga

SEQ ID NO: 10958 - RNA, 21 nt, Artificial Sequence
  SAMD9L targeting guide sequence portion
uucuucacugugacagcaaag

SEQ ID NO: 10959 - RNA, 21 nt, Artificial Sequence
  SAMD9L targeting guide sequence portion
uugacuccacuuugugccaag

SEQ ID NO: 10960 - RNA, 21 nt, Artificial Sequence
  SAMD9L targeting guide sequence portion
uugaguccaauaagcuuucuc

SEQ ID NO: 10961 - RNA, 21 nt, Artificial Sequence
  SAMD9L targeting guide sequence portion
uugagucugaaaaugcauauu

SEQ ID NO: 10962 - RNA, 21 nt, Artificial Sequence
  SAMD9L targeting guide sequence portion
uugaguuuaacacagauuuua

SEQ ID NO: 10963 - RNA, 21 nt, Artificial Sequence
  SAMD9L targeting guide sequence portion
uugauaccaagaugagguaaa

SEQ ID NO: 10964 - RNA, 21 nt, Artificial Sequence
  SAMD9L targeting guide sequence portion
uugauauccacuggucacauc

SEQ ID NO: 10965 - RNA, 21 nt, Artificial Sequence
  SAMD9L targeting guide sequence portion
uugcccuauagacaguuauga

SEQ ID NO: 10966 - RNA, 21 nt, Artificial Sequence
  SAMD9L targeting guide sequence portion
uugccucccugaaugaauuac

SEQ ID NO: 10967 - RNA, 21 nt, Artificial Sequence
  SAMD9L targeting guide sequence portion
uugcugucacagugaagaaau

SEQ ID NO: 10968 - RNA, 21 nt, Artificial Sequence
  SAMD9L targeting guide sequence portion
uugcuuuuauaaguuuucuaa

SEQ ID NO: 10969 - RNA, 21 nt, Artificial Sequence
  SAMD9L targeting guide sequence portion
uugcuuuugccucccugaaug

SEQ ID NO: 10970 - RNA, 21 nt, Artificial Sequence
  SAMD9L targeting guide sequence portion
uuggacucaaacccacagauc

SEQ ID NO: 10971 - RNA, 21 nt, Artificial Sequence
  SAMD9L targeting guide sequence portion
uuggcacaaaguggagucaau

SEQ ID NO: 10972 - RNA, 21 nt, Artificial Sequence
  SAMD9L targeting guide sequence portion
uugguaucaauaaaaacuuau

SEQ ID NO: 10973 - RNA, 21 nt, Artificial Sequence
  SAMD9L targeting guide sequence portion
uuguaauucauucagggaggc

SEQ ID NO: 10974 - RNA, 21 nt, Artificial Sequence
  SAMD9L targeting guide sequence portion
uugugccaagcucugcgggua

SEQ ID NO: 10975 - RNA, 21 nt, Artificial Sequence
  SAMD9L targeting guide sequence portion
uuuaaaacauuaaaagauuga

SEQ ID NO: 10976 - RNA, 21 nt, Artificial Sequence
  SAMD9L targeting guide sequence portion
uuuaaauaagaugaauguaaa

SEQ ID NO: 10977 - RNA, 21 nt, Artificial Sequence
  SAMD9L targeting guide sequence portion
uuuaaauaugcauuuucagac

SEQ ID NO: 10978 - RNA, 21 nt, Artificial Sequence
  SAMD9L targeting guide sequence portion
uuuaaaucuuugcugucacag

SEQ ID NO: 10979 - RNA, 21 nt, Artificial Sequence
  SAMD9L targeting guide sequence portion
uuuaacacagauuuuauugcc

SEQ ID NO: 10980 - RNA, 21 nt, Artificial Sequence
  SAMD9L targeting guide sequence portion
uuuaagauaugaaauaugccu

SEQ ID NO: 10981 - RNA, 21 nt, Artificial Sequence
  SAMD9L targeting guide sequence portion
uuuaauguuuuaaauaugcau

SEQ ID NO: 10982 - RNA, 21 nt, Artificial Sequence
  SAMD9L targeting guide sequence portion
uuuacauucaucuuauuuaaa

SEQ ID NO: 10983 - RNA, 21 nt, Artificial Sequence
  SAMD9L targeting guide sequence portion
uuuaccucaucuugguaucaa

SEQ ID NO: 10984 - RNA, 21 nt, Artificial Sequence
  SAMD9L targeting guide sequence portion
uuuagaaaacuuauaaaagca

SEQ ID NO: 10985 - RNA, 21 nt, Artificial Sequence
  SAMD9L targeting guide sequence portion
uuuauaaguuuucuaaauuau

SEQ ID NO: 10986 - RNA, 21 nt, Artificial Sequence
  SAMD9L targeting guide sequence portion
uuuauaucuuuaugauuuuau

SEQ ID NO: 10987 - RNA, 21 nt, Artificial Sequence
  SAMD9L targeting guide sequence portion
uuuaugauuuuauucucucuc

SEQ ID NO: 10988 - RNA, 21 nt, Artificial Sequence
  SAMD9L targeting guide sequence portion
uuuauucucucucucuauucu

SEQ ID NO: 10989 - RNA, 21 nt, Artificial Sequence
  SAMD9L targeting guide sequence portion
uuuauugauaccaagaugagg

SEQ ID NO: 10990 - RNA, 21 nt, Artificial Sequence
  SAMD9L targeting guide sequence portion
uuuauugcccuauagacaguu

SEQ ID NO: 10991 - RNA, 21 nt, Artificial Sequence
  SAMD9L targeting guide sequence portion
uuuauuuauaucuuuaugauu

SEQ ID NO: 10992 - RNA, 21 nt, Artificial Sequence
  SAMD9L targeting guide sequence portion
uuucagacucaaauaauuaag

SEQ ID NO: 10993 - RNA, 21 nt, Artificial Sequence
  SAMD9L targeting guide sequence portion
uuucauaacauuauggcuaac

SEQ ID NO: 10994 - RNA, 21 nt, Artificial Sequence
  SAMD9L targeting guide sequence portion
uuucauaucuuaaaaaggcuu

SEQ ID NO: 10995 - RNA, 21 nt, Artificial Sequence
  SAMD9L targeting guide sequence portion
uuucauugauauccacugguc

SEQ ID NO: 10996 - RNA, 21 nt, Artificial Sequence
  SAMD9L targeting guide sequence portion
uuucuaaauuauuucuucacu

SEQ ID NO: 10997 - RNA, 21 nt, Artificial Sequence
  SAMD9L targeting guide sequence portion
uuucucuuuuacauucaucuu

SEQ ID NO: 10998 - RNA, 21 nt, Artificial Sequence
  SAMD9L targeting guide sequence portion
uuucuucacugugacagcaaa

SEQ ID NO: 10999 - RNA, 21 nt, Artificial Sequence
  SAMD9L targeting guide sequence portion
uuugaguccaauaagcuuucu

SEQ ID NO: 11000 - RNA, 21 nt, Artificial Sequence
  SAMD9L targeting guide sequence portion
uuugagucugaaaaugcauau

SEQ ID NO: 11001 - RNA, 21 nt, Artificial Sequence
  SAMD9L targeting guide sequence portion
uuugccucccugaaugaauua

SEQ ID NO: 11002 - RNA, 21 nt, Artificial Sequence
  SAMD9L targeting guide sequence portion
uuugcugucacagugaagaaa

SEQ ID NO: 11003 - RNA, 21 nt, Artificial Sequence
  SAMD9L targeting guide sequence portion
uuugcuuuugccucccugaau

SEQ ID NO: 11004 - RNA, 21 nt, Artificial Sequence
  SAMD9L targeting guide sequence portion
uuugugccaagcucugcgggu

SEQ ID NO: 11005 - RNA, 21 nt, Artificial Sequence
  SAMD9L targeting guide sequence portion
uuuuaaauaugcauuuucaga

SEQ ID NO: 11006 - RNA, 21 nt, Artificial Sequence
  SAMD9L targeting guide sequence portion
uuuuaagauaugaaauaugcc

SEQ ID NO: 11007 - RNA, 21 nt, Artificial Sequence
  SAMD9L targeting guide sequence portion
uuuuaauguuuuaaauaugca

SEQ ID NO: 11008 - RNA, 21 nt, Artificial Sequence
  SAMD9L targeting guide sequence portion
uuuuacauucaucuuauuuaa

SEQ ID NO: 11009 - RNA, 21 nt, Artificial Sequence
  SAMD9L targeting guide sequence portion
uuuuauaaguuuucuaaauua

SEQ ID NO: 11010 - RNA, 21 nt, Artificial Sequence
  SAMD9L targeting guide sequence portion
uuuuauucucucucucuauuc

SEQ ID NO: 11011 - RNA, 21 nt, Artificial Sequence
  SAMD9L targeting guide sequence portion
uuuuauugauaccaagaugag

SEQ ID NO: 11012 - RNA, 21 nt, Artificial Sequence
  SAMD9L targeting guide sequence portion
uuuuauugcccuauagacagu

SEQ ID NO: 11013 - RNA, 21 nt, Artificial Sequence
  SAMD9L targeting guide sequence portion
uuuucagacucaaauaauuaa

SEQ ID NO: 11014 - RNA, 21 nt, Artificial Sequence
  SAMD9L targeting guide sequence portion
uuuucuaaauuauuucuucac

SEQ ID NO: 11015 - RNA, 21 nt, Artificial Sequence
  SAMD9L targeting guide sequence portion
uuuugccucccugaaugaauu

SEQ ID NO: 11016 - RNA, 21 nt, Artificial Sequence
  SAMD9L targeting guide sequence portion
uuuugcuuuugccucccugaa

SEQ ID NO: 11017 - RNA, 21 nt, Artificial Sequence
  SAMD9L targeting guide sequence portion
uuuuuaagauaugaaauaugc

SEQ ID NO: 11018 - RNA, 21 nt, Artificial Sequence
  SAMD9L targeting guide sequence portion
uuuuuauugauaccaagauga

SEQ ID NO: 11019 - RNA, 22 nt, Artificial Sequence
  SAMD9L targeting guide sequence portion
aaaaaggcuuguaauucauuca

SEQ ID NO: 11020 - RNA, 22 nt, Artificial Sequence
  SAMD9L targeting guide sequence portion
aaaacauuaaaagauugacucc

SEQ ID NO: 11021 - RNA, 22 nt, Artificial Sequence
  SAMD9L targeting guide sequence portion
aaaacuuauaaaagcaauugag

SEQ ID NO: 11022 - RNA, 22 nt, Artificial Sequence
  SAMD9L targeting guide sequence portion
aaaagagaaagcuuauuggacu

SEQ ID NO: 11023 - RNA, 22 nt, Artificial Sequence
  SAMD9L targeting guide sequence portion
aaaagauugacuccacuuugug

SEQ ID NO: 11024 - RNA, 22 nt, Artificial Sequence
  SAMD9L targeting guide sequence portion
aaaagcaaaaucuguaauuaga

SEQ ID NO: 11025 - RNA, 22 nt, Artificial Sequence
  SAMD9L targeting guide sequence portion
aaaagcaauugaguuuaacaca

SEQ ID NO: 11026 - RNA, 22 nt, Artificial Sequence
  SAMD9L targeting guide sequence portion
aaaaggcuuguaauucauucag

SEQ ID NO: 11027 - RNA, 22 nt, Artificial Sequence
  SAMD9L targeting guide sequence portion
aaaaucauaaagauauaaauaa

SEQ ID NO: 11028 - RNA, 22 nt, Artificial Sequence
  SAMD9L targeting guide sequence portion
aaaaucuguaauuagagguuag

SEQ ID NO: 11029 - RNA, 22 nt, Artificial Sequence
  SAMD9L targeting guide sequence portion
aaaaucuguguuaaacucaauu

SEQ ID NO: 11030 - RNA, 22 nt, Artificial Sequence
  SAMD9L targeting guide sequence portion
aaaaugcauauuuaaaacauua

SEQ ID NO: 11031 - RNA, 22 nt, Artificial Sequence
  SAMD9L targeting guide sequence portion
aaacauuaaaagauugacucca

SEQ ID NO: 11032 - RNA, 22 nt, Artificial Sequence
  SAMD9L targeting guide sequence portion
aaacccacagauccacaccaga

SEQ ID NO: 11033 - RNA, 22 nt, Artificial Sequence
  SAMD9L targeting guide sequence portion
aaacucaauugcuuuuauaagu

SEQ ID NO: 11034 - RNA, 22 nt, Artificial Sequence
  SAMD9L targeting guide sequence portion
aaacuuauaaaagcaauugagu

SEQ ID NO: 11035 - RNA, 22 nt, Artificial Sequence
  SAMD9L targeting guide sequence portion
aaacuucuuaauuauuugaguc

SEQ ID NO: 11036 - RNA, 22 nt, Artificial Sequence
  SAMD9L targeting guide sequence portion
aaagagaaagcuuauuggacuc

SEQ ID NO: 11037 - RNA, 22 nt, Artificial Sequence
  SAMD9L targeting guide sequence portion
aaagauauaaauaaacguauuu

SEQ ID NO: 11038 - RNA, 22 nt, Artificial Sequence
  SAMD9L targeting guide sequence portion
aaagauugacuccacuuugugc

SEQ ID NO: 11039 - RNA, 22 nt, Artificial Sequence
  SAMD9L targeting guide sequence portion
aaagauuuaaauaagaugaaug

SEQ ID NO: 11040 - RNA, 22 nt, Artificial Sequence
  SAMD9L targeting guide sequence portion
aaagcaaaaucuguaauuagag

SEQ ID NO: 11041 - RNA, 22 nt, Artificial Sequence
  SAMD9L targeting guide sequence portion
aaagcaauugaguuuaacacag

SEQ ID NO: 11042 - RNA, 22 nt, Artificial Sequence
  SAMD9L targeting guide sequence portion
aaagcuuauuggacucaaaccc

SEQ ID NO: 11043 - RNA, 22 nt, Artificial Sequence
  SAMD9L targeting guide sequence portion
aaaggcuuguaauucauucagg

SEQ ID NO: 11044 - RNA, 22 nt, Artificial Sequence
  SAMD9L targeting guide sequence portion
aaagugccaugagaauagagag

SEQ ID NO: 11045 - RNA, 22 nt, Artificial Sequence
  SAMD9L targeting guide sequence portion
aaaguggagucaaucuuuuaau

SEQ ID NO: 11046 - RNA, 22 nt, Artificial Sequence
  SAMD9L targeting guide sequence portion
aaauaagaugaauguaaaagag

SEQ ID NO: 11047 - RNA, 22 nt, Artificial Sequence
  SAMD9L targeting guide sequence portion
aaauaauuaagaaguuucauug

SEQ ID NO: 11048 - RNA, 22 nt, Artificial Sequence
  SAMD9L targeting guide sequence portion
aaauaauuuagaaaacuuauaa

SEQ ID NO: 11049 - RNA, 22 nt, Artificial Sequence
  SAMD9L targeting guide sequence portion
aaauacguuuauuuauaucuuu

SEQ ID NO: 11050 - RNA, 22 nt, Artificial Sequence
  SAMD9L targeting guide sequence portion
aaauagaacucugguguggauc

SEQ ID NO: 11051 - RNA, 22 nt, Artificial Sequence
  SAMD9L targeting guide sequence portion
aaauauauuguuccccauccac

SEQ ID NO: 11052 - RNA, 22 nt, Artificial Sequence
  SAMD9L targeting guide sequence portion
aaauaugcauuuucagacucaa

SEQ ID NO: 11053 - RNA, 22 nt, Artificial Sequence
  SAMD9L targeting guide sequence portion
aaauaugccuacccgcagagcu

SEQ ID NO: 11054 - RNA, 22 nt, Artificial Sequence
  SAMD9L targeting guide sequence portion
aaaucauaaagauauaaauaaa

SEQ ID NO: 11055 - RNA, 22 nt, Artificial Sequence
  SAMD9L targeting guide sequence portion
aaaucuguaauuagagguuagc

SEQ ID NO: 11056 - RNA, 22 nt, Artificial Sequence
  SAMD9L targeting guide sequence portion
aaaucuguguuaaacucaauug

SEQ ID NO: 11057 - RNA, 22 nt, Artificial Sequence
  SAMD9L targeting guide sequence portion
aaaucuuugcugucacagugaa

SEQ ID NO: 11058 - RNA, 22 nt, Artificial Sequence
  SAMD9L targeting guide sequence portion
aaaugcauauuuaaaacauuaa

SEQ ID NO: 11059 - RNA, 22 nt, Artificial Sequence
  SAMD9L targeting guide sequence portion
aaauuauuucuucacugugaca

SEQ ID NO: 11060 - RNA, 22 nt, Artificial Sequence
  SAMD9L targeting guide sequence portion
aacacagauuuuauugcccuau

SEQ ID NO: 11061 - RNA, 22 nt, Artificial Sequence
  SAMD9L targeting guide sequence portion
aacauuaaaagauugacuccac

SEQ ID NO: 11062 - RNA, 22 nt, Artificial Sequence
  SAMD9L targeting guide sequence portion
aacauuauggcuaaccucuaau

SEQ ID NO: 11063 - RNA, 22 nt, Artificial Sequence
  SAMD9L targeting guide sequence portion
aacccacagauccacaccagag

SEQ ID NO: 11064 - RNA, 22 nt, Artificial Sequence
  SAMD9L targeting guide sequence portion
aaccucuaauuacagauuuugc

SEQ ID NO: 11065 - RNA, 22 nt, Artificial Sequence
  SAMD9L targeting guide sequence portion
aacucaauugcuuuuauaaguu

SEQ ID NO: 11066 - RNA, 22 nt, Artificial Sequence
  SAMD9L targeting guide sequence portion
aacucugguguggaucuguggg

SEQ ID NO: 11067 - RNA, 22 nt, Artificial Sequence
  SAMD9L targeting guide sequence portion
aacugucuauagggcaauaaaa

SEQ ID NO: 11068 - RNA, 22 nt, Artificial Sequence
  SAMD9L targeting guide sequence portion
aacuuauaaaagcaauugaguu

SEQ ID NO: 11069 - RNA, 22 nt, Artificial Sequence
  SAMD9L targeting guide sequence portion
aacuucuuaauuauuugagucu

SEQ ID NO: 11070 - RNA, 22 nt, Artificial Sequence
  SAMD9L targeting guide sequence portion
aagaaauaauuuagaaaacuua

SEQ ID NO: 11071 - RNA, 22 nt, Artificial Sequence
  SAMD9L targeting guide sequence portion
aagaaguuucauugauauccac

SEQ ID NO: 11072 - RNA, 22 nt, Artificial Sequence
  SAMD9L targeting guide sequence portion
aagagaaagcuuauuggacuca

SEQ ID NO: 11073 - RNA, 22 nt, Artificial Sequence
  SAMD9L targeting guide sequence portion
aagauauaaauaaacguauuug

SEQ ID NO: 11074 - RNA, 22 nt, Artificial Sequence
  SAMD9L targeting guide sequence portion
aagauaugaaauaugccuaccc

SEQ ID NO: 11075 - RNA, 22 nt, Artificial Sequence
  SAMD9L targeting guide sequence portion
aagaugaauguaaaagagaaag

SEQ ID NO: 11076 - RNA, 22 nt, Artificial Sequence
  SAMD9L targeting guide sequence portion
aagaugagguaaauagaacucu

SEQ ID NO: 11077 - RNA, 22 nt, Artificial Sequence
  SAMD9L targeting guide sequence portion
aagauugacuccacuuugugcc

SEQ ID NO: 11078 - RNA, 22 nt, Artificial Sequence
  SAMD9L targeting guide sequence portion
aagauuuaaauaagaugaaugu

SEQ ID NO: 11079 - RNA, 22 nt, Artificial Sequence
  SAMD9L targeting guide sequence portion
aagcaaaaucuguaauuagagg

SEQ ID NO: 11080 - RNA, 22 nt, Artificial Sequence
  SAMD9L targeting guide sequence portion
aagcaauugaguuuaacacaga

SEQ ID NO: 11081 - RNA, 22 nt, Artificial Sequence
  SAMD9L targeting guide sequence portion
aagccuuuuuaagauaugaaau

SEQ ID NO: 11082 - RNA, 22 nt, Artificial Sequence
  SAMD9L targeting guide sequence portion
aagcucugcggguaggcauauu

SEQ ID NO: 11083 - RNA, 22 nt, Artificial Sequence
  SAMD9L targeting guide sequence portion
aagcuuauuggacucaaaccca

SEQ ID NO: 11084 - RNA, 22 nt, Artificial Sequence
  SAMD9L targeting guide sequence portion
aagcuuucucuuuuacauucau

SEQ ID NO: 11085 - RNA, 22 nt, Artificial Sequence
  SAMD9L targeting guide sequence portion
aaggcuuguaauucauucaggg

SEQ ID NO: 11086 - RNA, 22 nt, Artificial Sequence
  SAMD9L targeting guide sequence portion
aagguaaauauauuguucccca

SEQ ID NO: 11087 - RNA, 22 nt, Artificial Sequence
  SAMD9L targeting guide sequence portion
aagugccaugagaauagagaga

SEQ ID NO: 11088 - RNA, 22 nt, Artificial Sequence
  SAMD9L targeting guide sequence portion
aaguggagucaaucuuuuaaug

SEQ ID NO: 11089 - RNA, 22 nt, Artificial Sequence
  SAMD9L targeting guide sequence portion
aaguuucauugauauccacugg

SEQ ID NO: 11090 - RNA, 22 nt, Artificial Sequence
  SAMD9L targeting guide sequence portion
aaguuuucuaaauuauuucuuc

SEQ ID NO: 11091 - RNA, 22 nt, Artificial Sequence
  SAMD9L targeting guide sequence portion
aauaaaaucauaaagauauaaa

SEQ ID NO: 11092 - RNA, 22 nt, Artificial Sequence
  SAMD9L targeting guide sequence portion
aauaaaaucuguguuaaacuca

SEQ ID NO: 11093 - RNA, 22 nt, Artificial Sequence
  SAMD9L targeting guide sequence portion
aauaagaugaauguaaaagaga

SEQ ID NO: 11094 - RNA, 22 nt, Artificial Sequence
  SAMD9L targeting guide sequence portion
aauaagcuuucucuuuuacauu

SEQ ID NO: 11095 - RNA, 22 nt, Artificial Sequence
  SAMD9L targeting guide sequence portion
aauaauuaagaaguuucauuga

SEQ ID NO: 11096 - RNA, 22 nt, Artificial Sequence
  SAMD9L targeting guide sequence portion
aauaauuuagaaaacuuauaaa

SEQ ID NO: 11097 - RNA, 22 nt, Artificial Sequence
  SAMD9L targeting guide sequence portion
aauacguuuauuuauaucuuua

SEQ ID NO: 11098 - RNA, 22 nt, Artificial Sequence
  SAMD9L targeting guide sequence portion
aauagaacucugguguggaucu

SEQ ID NO: 11099 - RNA, 22 nt, Artificial Sequence
  SAMD9L targeting guide sequence portion
aauagagagagagaauaaaauc

SEQ ID NO: 11100 - RNA, 22 nt, Artificial Sequence
  SAMD9L targeting guide sequence portion
aauaugcauuuucagacucaaa

SEQ ID NO: 11101 - RNA, 22 nt, Artificial Sequence
  SAMD9L targeting guide sequence portion
aauaugccuacccgcagagcuu

SEQ ID NO: 11102 - RNA, 22 nt, Artificial Sequence
  SAMD9L targeting guide sequence portion
aaucauaaagauauaaauaaac

SEQ ID NO: 11103 - RNA, 22 nt, Artificial Sequence
  SAMD9L targeting guide sequence portion
aaucuguaauuagagguuagcc

SEQ ID NO: 11104 - RNA, 22 nt, Artificial Sequence
  SAMD9L targeting guide sequence portion
aaucuguguuaaacucaauugc

SEQ ID NO: 11105 - RNA, 22 nt, Artificial Sequence
  SAMD9L targeting guide sequence portion
aaucuuugcugucacagugaag

SEQ ID NO: 11106 - RNA, 22 nt, Artificial Sequence
  SAMD9L targeting guide sequence portion
aaucuuuuaauguuuuaaauau

SEQ ID NO: 11107 - RNA, 22 nt, Artificial Sequence
  SAMD9L targeting guide sequence portion
aaugaaacuucuuaauuauuug

SEQ ID NO: 11108 - RNA, 22 nt, Artificial Sequence
  SAMD9L targeting guide sequence portion
aaugaauuacaagccuuuuuaa

SEQ ID NO: 11109 - RNA, 22 nt, Artificial Sequence
  SAMD9L targeting guide sequence portion
aaugcauauuuaaaacauuaaa

SEQ ID NO: 11110 - RNA, 22 nt, Artificial Sequence
  SAMD9L targeting guide sequence portion
aauguaaaagagaaagcuuauu

SEQ ID NO: 11111 - RNA, 22 nt, Artificial Sequence
  SAMD9L targeting guide sequence portion
aauguuaugaaagugccaugag

SEQ ID NO: 11112 - RNA, 22 nt, Artificial Sequence
  SAMD9L targeting guide sequence portion
aauguuuuaaauaugcauuuuc

SEQ ID NO: 11113 - RNA, 22 nt, Artificial Sequence
  SAMD9L targeting guide sequence portion
aauuaagaaguuucauugauau

SEQ ID NO: 11114 - RNA, 22 nt, Artificial Sequence
  SAMD9L targeting guide sequence portion
aauuacaagccuuuuuaagaua

SEQ ID NO: 11115 - RNA, 22 nt, Artificial Sequence
  SAMD9L targeting guide sequence portion
aauuacagauuuugcuuuugcc

SEQ ID NO: 11116 - RNA, 22 nt, Artificial Sequence
  SAMD9L targeting guide sequence portion
aauuagagguuagccauaaugu

SEQ ID NO: 11117 - RNA, 22 nt, Artificial Sequence
  SAMD9L targeting guide sequence portion
aauuauuucuucacugugacag

SEQ ID NO: 11118 - RNA, 22 nt, Artificial Sequence
  SAMD9L targeting guide sequence portion
aauuauuugagucugaaaaugc

SEQ ID NO: 11119 - RNA, 22 nt, Artificial Sequence
  SAMD9L targeting guide sequence portion
aauucauucagggaggcaaaag

SEQ ID NO: 11120 - RNA, 22 nt, Artificial Sequence
  SAMD9L targeting guide sequence portion
aauugaguuuaacacagauuuu

SEQ ID NO: 11121 - RNA, 22 nt, Artificial Sequence
  SAMD9L targeting guide sequence portion
aauugcuuuuauaaguuuucua

SEQ ID NO: 11122 - RNA, 22 nt, Artificial Sequence
  SAMD9L targeting guide sequence portion
aauuuagaaaacuuauaaaagc

SEQ ID NO: 11123 - RNA, 22 nt, Artificial Sequence
  SAMD9L targeting guide sequence portion
acaaaguggagucaaucuuuua

SEQ ID NO: 11124 - RNA, 22 nt, Artificial Sequence
  SAMD9L targeting guide sequence portion
acaagccuuuuuaagauaugaa

SEQ ID NO: 11125 - RNA, 22 nt, Artificial Sequence
  SAMD9L targeting guide sequence portion
acacagauuuuauugcccuaua

SEQ ID NO: 11126 - RNA, 22 nt, Artificial Sequence
  SAMD9L targeting guide sequence portion
acaccagaguucuauuuaccuc

SEQ ID NO: 11127 - RNA, 22 nt, Artificial Sequence
  SAMD9L targeting guide sequence portion
acagauccacaccagaguucua

SEQ ID NO: 11128 - RNA, 22 nt, Artificial Sequence
  SAMD9L targeting guide sequence portion
acagauuuuauugcccuauaga

SEQ ID NO: 11129 - RNA, 22 nt, Artificial Sequence
  SAMD9L targeting guide sequence portion
acagauuuugcuuuugccuccc

SEQ ID NO: 11130 - RNA, 22 nt, Artificial Sequence
  SAMD9L targeting guide sequence portion
acagcaaagauuuaaauaagau

SEQ ID NO: 11131 - RNA, 22 nt, Artificial Sequence
  SAMD9L targeting guide sequence portion
acagugaagaaauaauuuagaa

SEQ ID NO: 11132 - RNA, 22 nt, Artificial Sequence
  SAMD9L targeting guide sequence portion
acaguuaugaugugaccagugg

SEQ ID NO: 11133 - RNA, 22 nt, Artificial Sequence
  SAMD9L targeting guide sequence portion
acaucauaacugucuauagggc

SEQ ID NO: 11134 - RNA, 22 nt, Artificial Sequence
  SAMD9L targeting guide sequence portion
acauuaaaagauugacuccacu

SEQ ID NO: 11135 - RNA, 22 nt, Artificial Sequence
  SAMD9L targeting guide sequence portion
acauuauggcuaaccucuaauu

SEQ ID NO: 11136 - RNA, 22 nt, Artificial Sequence
  SAMD9L targeting guide sequence portion
acauucaucuuauuuaaaucuu

SEQ ID NO: 11137 - RNA, 22 nt, Artificial Sequence
  SAMD9L targeting guide sequence portion
accaagaugagguaaauagaac

SEQ ID NO: 11138 - RNA, 22 nt, Artificial Sequence
  SAMD9L targeting guide sequence portion
accagaguucuauuuaccucau

SEQ ID NO: 11139 - RNA, 22 nt, Artificial Sequence
  SAMD9L targeting guide sequence portion
accaguggauaucaaugaaacu

SEQ ID NO: 11140 - RNA, 22 nt, Artificial Sequence
  SAMD9L targeting guide sequence portion
acccacagauccacaccagagu

SEQ ID NO: 11141 - RNA, 22 nt, Artificial Sequence
  SAMD9L targeting guide sequence portion
acccgcagagcuuggcacaaag

SEQ ID NO: 11142 - RNA, 22 nt, Artificial Sequence
  SAMD9L targeting guide sequence portion
accucuaauuacagauuuugcu

SEQ ID NO: 11143 - RNA, 22 nt, Artificial Sequence
  SAMD9L targeting guide sequence portion
acguuuauuuauaucuuuauga

SEQ ID NO: 11144 - RNA, 22 nt, Artificial Sequence
  SAMD9L targeting guide sequence portion
acucaaacccacagauccacac

SEQ ID NO: 11145 - RNA, 22 nt, Artificial Sequence
  SAMD9L targeting guide sequence portion
acucaaauaauuaagaaguuuc

SEQ ID NO: 11146 - RNA, 22 nt, Artificial Sequence
  SAMD9L targeting guide sequence portion
acucaauugcuuuuauaaguuu

SEQ ID NO: 11147 - RNA, 22 nt, Artificial Sequence
  SAMD9L targeting guide sequence portion
acuccacuuugugccaagcucu

SEQ ID NO: 11148 - RNA, 22 nt, Artificial Sequence
  SAMD9L targeting guide sequence portion
acucugguguggaucugugggu

SEQ ID NO: 11149 - RNA, 22 nt, Artificial Sequence
  SAMD9L targeting guide sequence portion
acuggucacaucauaacugucu

SEQ ID NO: 11150 - RNA, 22 nt, Artificial Sequence
  SAMD9L targeting guide sequence portion
acugucuauagggcaauaaaau

SEQ ID NO: 11151 - RNA, 22 nt, Artificial Sequence
  SAMD9L targeting guide sequence portion
acugugacagcaaagauuuaaa

SEQ ID NO: 11152 - RNA, 22 nt, Artificial Sequence
  SAMD9L targeting guide sequence portion
acuuauaaaagcaauugaguuu

SEQ ID NO: 11153 - RNA, 22 nt, Artificial Sequence
  SAMD9L targeting guide sequence portion
acuucuuaauuauuugagucug

SEQ ID NO: 11154 - RNA, 22 nt, Artificial Sequence
  SAMD9L targeting guide sequence portion
acuuucauaacauuauggcuaa

SEQ ID NO: 11155 - RNA, 22 nt, Artificial Sequence
  SAMD9L targeting guide sequence portion
acuuugugccaagcucugcggg

SEQ ID NO: 11156 - RNA, 22 nt, Artificial Sequence
  SAMD9L targeting guide sequence portion
agaaaacuuauaaaagcaauug

SEQ ID NO: 11157 - RNA, 22 nt, Artificial Sequence
  SAMD9L targeting guide sequence portion
agaaagcuuauuggacucaaac

SEQ ID NO: 11158 - RNA, 22 nt, Artificial Sequence
  SAMD9L targeting guide sequence portion
agaaauaauuuagaaaacuuau

SEQ ID NO: 11159 - RNA, 22 nt, Artificial Sequence
  SAMD9L targeting guide sequence portion
agaacucugguguggaucugug

SEQ ID NO: 11160 - RNA, 22 nt, Artificial Sequence
  SAMD9L targeting guide sequence portion
agaaguuucauugauauccacu

SEQ ID NO: 11161 - RNA, 22 nt, Artificial Sequence
  SAMD9L targeting guide sequence portion
agaauaaaaucauaaagauaua

SEQ ID NO: 11162 - RNA, 22 nt, Artificial Sequence
  SAMD9L targeting guide sequence portion
agaauagagagagagaauaaaa

SEQ ID NO: 11163 - RNA, 22 nt, Artificial Sequence
  SAMD9L targeting guide sequence portion
agacaguuaugaugugaccagu

SEQ ID NO: 11164 - RNA, 22 nt, Artificial Sequence
  SAMD9L targeting guide sequence portion
agacucaaauaauuaagaaguu

SEQ ID NO: 11165 - RNA, 22 nt, Artificial Sequence
  SAMD9L targeting guide sequence portion
agagaaagcuuauuggacucaa

SEQ ID NO: 11166 - RNA, 22 nt, Artificial Sequence
  SAMD9L targeting guide sequence portion
agagaauaaaaucauaaagaua

SEQ ID NO: 11167 - RNA, 22 nt, Artificial Sequence
  SAMD9L targeting guide sequence portion
agagagaauaaaaucauaaaga

SEQ ID NO: 11168 - RNA, 22 nt, Artificial Sequence
  SAMD9L targeting guide sequence portion
agagagagaauaaaaucauaaa

SEQ ID NO: 11169 - RNA, 22 nt, Artificial Sequence
  SAMD9L targeting guide sequence portion
agagagagagaauaaaaucaua

SEQ ID NO: 11170 - RNA, 22 nt, Artificial Sequence
  SAMD9L targeting guide sequence portion
agagcuuggcacaaaguggagu

SEQ ID NO: 11171 - RNA, 22 nt, Artificial Sequence
  SAMD9L targeting guide sequence portion
agagguuagccauaauguuaug

SEQ ID NO: 11172 - RNA, 22 nt, Artificial Sequence
  SAMD9L targeting guide sequence portion
agaguucuauuuaccucaucuu

SEQ ID NO: 11173 - RNA, 22 nt, Artificial Sequence
  SAMD9L targeting guide sequence portion
agauauaaauaaacguauuuga

SEQ ID NO: 11174 - RNA, 22 nt, Artificial Sequence
  SAMD9L targeting guide sequence portion
agauaugaaauaugccuacccg

SEQ ID NO: 11175 - RNA, 22 nt, Artificial Sequence
  SAMD9L targeting guide sequence portion
agauccacaccagaguucuauu

SEQ ID NO: 11176 - RNA, 22 nt, Artificial Sequence
  SAMD9L targeting guide sequence portion
agaugaauguaaaagagaaagc

SEQ ID NO: 11177 - RNA, 22 nt, Artificial Sequence
  SAMD9L targeting guide sequence portion
agaugagguaaauagaacucug

SEQ ID NO: 11178 - RNA, 22 nt, Artificial Sequence
  SAMD9L targeting guide sequence portion
agauugacuccacuuugugcca

SEQ ID NO: 11179 - RNA, 22 nt, Artificial Sequence
  SAMD9L targeting guide sequence portion
agauuuaaauaagaugaaugua

SEQ ID NO: 11180 - RNA, 22 nt, Artificial Sequence
  SAMD9L targeting guide sequence portion
agauuuuauugcccuauagaca

SEQ ID NO: 11181 - RNA, 22 nt, Artificial Sequence
  SAMD9L targeting guide sequence portion
agauuuugcuuuugccucccug

SEQ ID NO: 11182 - RNA, 22 nt, Artificial Sequence
  SAMD9L targeting guide sequence portion
agcaaaaucuguaauuagaggu

SEQ ID NO: 11183 - RNA, 22 nt, Artificial Sequence
  SAMD9L targeting guide sequence portion
agcaaagauuuaaauaagauga

SEQ ID NO: 11184 - RNA, 22 nt, Artificial Sequence
  SAMD9L targeting guide sequence portion
agcaauugaguuuaacacagau

SEQ ID NO: 11185 - RNA, 22 nt, Artificial Sequence
  SAMD9L targeting guide sequence portion
agccauaauguuaugaaagugc

SEQ ID NO: 11186 - RNA, 22 nt, Artificial Sequence
  SAMD9L targeting guide sequence portion
agccuuuuuaagauaugaaaua

SEQ ID NO: 11187 - RNA, 22 nt, Artificial Sequence
  SAMD9L targeting guide sequence portion
agcucugcggguaggcauauuu

SEQ ID NO: 11188 - RNA, 22 nt, Artificial Sequence
  SAMD9L targeting guide sequence portion
agcuuauuggacucaaacccac

SEQ ID NO: 11189 - RNA, 22 nt, Artificial Sequence
  SAMD9L targeting guide sequence portion
agcuuggcacaaaguggaguca

SEQ ID NO: 11190 - RNA, 22 nt, Artificial Sequence
  SAMD9L targeting guide sequence portion
agcuuucucuuuuacauucauc

SEQ ID NO: 11191 - RNA, 22 nt, Artificial Sequence
  SAMD9L targeting guide sequence portion
aggcaaaagcaaaaucuguaau

SEQ ID NO: 11192 - RNA, 22 nt, Artificial Sequence
  SAMD9L targeting guide sequence portion
aggcauauuucauaucuuaaaa

SEQ ID NO: 11193 - RNA, 22 nt, Artificial Sequence
  SAMD9L targeting guide sequence portion
aggcuuguaauucauucaggga

SEQ ID NO: 11194 - RNA, 22 nt, Artificial Sequence
  SAMD9L targeting guide sequence portion
agggaggcaaaagcaaaaucug

SEQ ID NO: 11195 - RNA, 22 nt, Artificial Sequence
  SAMD9L targeting guide sequence portion
agggcaauaaaaucuguguuaa

SEQ ID NO: 11196 - RNA, 22 nt, Artificial Sequence
  SAMD9L targeting guide sequence portion
agguaaauagaacucuggugug

SEQ ID NO: 11197 - RNA, 22 nt, Artificial Sequence
  SAMD9L targeting guide sequence portion
agguaaauauauuguuccccau

SEQ ID NO: 11198 - RNA, 22 nt, Artificial Sequence
  SAMD9L targeting guide sequence portion
agguuagccauaauguuaugaa

SEQ ID NO: 11199 - RNA, 22 nt, Artificial Sequence
  SAMD9L targeting guide sequence portion
agucaaucuuuuaauguuuuaa

SEQ ID NO: 11200 - RNA, 22 nt, Artificial Sequence
  SAMD9L targeting guide sequence portion
aguccaauaagcuuucucuuuu

SEQ ID NO: 11201 - RNA, 22 nt, Artificial Sequence
  SAMD9L targeting guide sequence portion
agucugaaaaugcauauuuaaa

SEQ ID NO: 11202 - RNA, 22 nt, Artificial Sequence
  SAMD9L targeting guide sequence portion
agugaagaaauaauuuagaaaa

SEQ ID NO: 11203 - RNA, 22 nt, Artificial Sequence
  SAMD9L targeting guide sequence portion
agugccaugagaauagagagag

SEQ ID NO: 11204 - RNA, 22 nt, Artificial Sequence
  SAMD9L targeting guide sequence portion
aguggagucaaucuuuuaaugu

SEQ ID NO: 11205 - RNA, 22 nt, Artificial Sequence
  SAMD9L targeting guide sequence portion
aguggauaucaaugaaacuucu

SEQ ID NO: 11206 - RNA, 22 nt, Artificial Sequence
  SAMD9L targeting guide sequence portion
aguuaugaugugaccaguggau

SEQ ID NO: 11207 - RNA, 22 nt, Artificial Sequence
  SAMD9L targeting guide sequence portion
aguucaaauacguuuauuuaua

SEQ ID NO: 11208 - RNA, 22 nt, Artificial Sequence
  SAMD9L targeting guide sequence portion
aguucuauuuaccucaucuugg

SEQ ID NO: 11209 - RNA, 22 nt, Artificial Sequence
  SAMD9L targeting guide sequence portion
aguuuaacacagauuuuauugc

SEQ ID NO: 11210 - RNA, 22 nt, Artificial Sequence
  SAMD9L targeting guide sequence portion
aguuucauugauauccacuggu

SEQ ID NO: 11211 - RNA, 22 nt, Artificial Sequence
  SAMD9L targeting guide sequence portion
aguuuucuaaauuauuucuuca

SEQ ID NO: 11212 - RNA, 22 nt, Artificial Sequence
  SAMD9L targeting guide sequence portion
aguuuuuauugauaccaagaug

SEQ ID NO: 11213 - RNA, 22 nt, Artificial Sequence
  SAMD9L targeting guide sequence portion
auaaaagcaauugaguuuaaca

SEQ ID NO: 11214 - RNA, 22 nt, Artificial Sequence
  SAMD9L targeting guide sequence portion
auaaaaucauaaagauauaaau

SEQ ID NO: 11215 - RNA, 22 nt, Artificial Sequence
  SAMD9L targeting guide sequence portion
auaaaaucuguguuaaacucaa

SEQ ID NO: 11216 - RNA, 22 nt, Artificial Sequence
  SAMD9L targeting guide sequence portion
auaaagauauaaauaaacguau

SEQ ID NO: 11217 - RNA, 22 nt, Artificial Sequence
  SAMD9L targeting guide sequence portion
auaaauaaacguauuugaacua

SEQ ID NO: 11218 - RNA, 22 nt, Artificial Sequence
  SAMD9L targeting guide sequence portion
auaacauuauggcuaaccucua

SEQ ID NO: 11219 - RNA, 22 nt, Artificial Sequence
  SAMD9L targeting guide sequence portion
auaacugucuauagggcaauaa

SEQ ID NO: 11220 - RNA, 22 nt, Artificial Sequence
  SAMD9L targeting guide sequence portion
auaagaugaauguaaaagagaa

SEQ ID NO: 11221 - RNA, 22 nt, Artificial Sequence
  SAMD9L targeting guide sequence portion
auaagcuuucucuuuuacauuc

SEQ ID NO: 11222 - RNA, 22 nt, Artificial Sequence
  SAMD9L targeting guide sequence portion
auaaguuuucuaaauuauuucu

SEQ ID NO: 11223 - RNA, 22 nt, Artificial Sequence
  SAMD9L targeting guide sequence portion
auaauguuaugaaagugccaug

SEQ ID NO: 11224 - RNA, 22 nt, Artificial Sequence
  SAMD9L targeting guide sequence portion
auaauuaagaaguuucauugau

SEQ ID NO: 11225 - RNA, 22 nt, Artificial Sequence
  SAMD9L targeting guide sequence portion
auaauuuagaaaacuuauaaaa

SEQ ID NO: 11226 - RNA, 22 nt, Artificial Sequence
  SAMD9L targeting guide sequence portion
auaccaagaugagguaaauaga

SEQ ID NO: 11227 - RNA, 22 nt, Artificial Sequence
  SAMD9L targeting guide sequence portion
auacguuuauuuauaucuuuau

SEQ ID NO: 11228 - RNA, 22 nt, Artificial Sequence
  SAMD9L targeting guide sequence portion
auagaacucugguguggaucug

SEQ ID NO: 11229 - RNA, 22 nt, Artificial Sequence
  SAMD9L targeting guide sequence portion
auagacaguuaugaugugacca

SEQ ID NO: 11230 - RNA, 22 nt, Artificial Sequence
  SAMD9L targeting guide sequence portion
auagagagagagaauaaaauca

SEQ ID NO: 11231 - RNA, 22 nt, Artificial Sequence
  SAMD9L targeting guide sequence portion
auagggcaauaaaaucuguguu

SEQ ID NO: 11232 - RNA, 22 nt, Artificial Sequence
  SAMD9L targeting guide sequence portion
auauaaauaaacguauuugaac

SEQ ID NO: 11233 - RNA, 22 nt, Artificial Sequence
  SAMD9L targeting guide sequence portion
auaucaaugaaacuucuuaauu

SEQ ID NO: 11234 - RNA, 22 nt, Artificial Sequence
  SAMD9L targeting guide sequence portion
auauccacuggucacaucauaa

SEQ ID NO: 11235 - RNA, 22 nt, Artificial Sequence
  SAMD9L targeting guide sequence portion
auaucuuaaaaaggcuuguaau

SEQ ID NO: 11236 - RNA, 22 nt, Artificial Sequence
  SAMD9L targeting guide sequence portion
auaucuuuaugauuuuauucuc

SEQ ID NO: 11237 - RNA, 22 nt, Artificial Sequence
  SAMD9L targeting guide sequence portion
auaugaaauaugccuacccgca

SEQ ID NO: 11238 - RNA, 22 nt, Artificial Sequence
  SAMD9L targeting guide sequence portion
auaugcauuuucagacucaaau

SEQ ID NO: 11239 - RNA, 22 nt, Artificial Sequence
  SAMD9L targeting guide sequence portion
auaugccuacccgcagagcuug

SEQ ID NO: 11240 - RNA, 22 nt, Artificial Sequence
  SAMD9L targeting guide sequence portion
auauuuaaaacauuaaaagauu

SEQ ID NO: 11241 - RNA, 22 nt, Artificial Sequence
  SAMD9L targeting guide sequence portion
auauuucauaucuuaaaaaggc

SEQ ID NO: 11242 - RNA, 22 nt, Artificial Sequence
  SAMD9L targeting guide sequence portion
aucaaugaaacuucuuaauuau

SEQ ID NO: 11243 - RNA, 22 nt, Artificial Sequence
  SAMD9L targeting guide sequence portion
aucauaaagauauaaauaaacg

SEQ ID NO: 11244 - RNA, 22 nt, Artificial Sequence
  SAMD9L targeting guide sequence portion
aucauaacugucuauagggcaa

SEQ ID NO: 11245 - RNA, 22 nt, Artificial Sequence
  SAMD9L targeting guide sequence portion
auccacaccagaguucuauuua

SEQ ID NO: 11246 - RNA, 22 nt, Artificial Sequence
  SAMD9L targeting guide sequence portion
auccacuggucacaucauaacu

SEQ ID NO: 11247 - RNA, 22 nt, Artificial Sequence
  SAMD9L targeting guide sequence portion
aucuguaauuagagguuagcca

SEQ ID NO: 11248 - RNA, 22 nt, Artificial Sequence
  SAMD9L targeting guide sequence portion
aucuguggguuugaguccaaua

SEQ ID NO: 11249 - RNA, 22 nt, Artificial Sequence
  SAMD9L targeting guide sequence portion
aucuguguuaaacucaauugcu

SEQ ID NO: 11250 - RNA, 22 nt, Artificial Sequence
  SAMD9L targeting guide sequence portion
aucuuaaaaaggcuuguaauuc

SEQ ID NO: 11251 - RNA, 22 nt, Artificial Sequence
  SAMD9L targeting guide sequence portion
aucuuauuuaaaucuuugcugu

SEQ ID NO: 11252 - RNA, 22 nt, Artificial Sequence
  SAMD9L targeting guide sequence portion
aucuuuaugauuuuauucucuc

SEQ ID NO: 11253 - RNA, 22 nt, Artificial Sequence
  SAMD9L targeting guide sequence portion
aucuuugcugucacagugaaga

SEQ ID NO: 11254 - RNA, 22 nt, Artificial Sequence
  SAMD9L targeting guide sequence portion
aucuuuuaauguuuuaaauaug

SEQ ID NO: 11255 - RNA, 22 nt, Artificial Sequence
  SAMD9L targeting guide sequence portion
augaaacuucuuaauuauuuga

SEQ ID NO: 11256 - RNA, 22 nt, Artificial Sequence
  SAMD9L targeting guide sequence portion
augaaagugccaugagaauaga

SEQ ID NO: 11257 - RNA, 22 nt, Artificial Sequence
  SAMD9L targeting guide sequence portion
augaaauaugccuacccgcaga

SEQ ID NO: 11258 - RNA, 22 nt, Artificial Sequence
  SAMD9L targeting guide sequence portion
augaauguaaaagagaaagcuu

SEQ ID NO: 11259 - RNA, 22 nt, Artificial Sequence
  SAMD9L targeting guide sequence portion
augaauuacaagccuuuuuaag

SEQ ID NO: 11260 - RNA, 22 nt, Artificial Sequence
  SAMD9L targeting guide sequence portion
augagaauagagagagagaaua

SEQ ID NO: 11261 - RNA, 22 nt, Artificial Sequence
  SAMD9L targeting guide sequence portion
augagguaaauagaacucuggu

SEQ ID NO: 11262 - RNA, 22 nt, Artificial Sequence
  SAMD9L targeting guide sequence portion
augaugugaccaguggauauca

SEQ ID NO: 11263 - RNA, 22 nt, Artificial Sequence
  SAMD9L targeting guide sequence portion
augauuuuauucucucucucua

SEQ ID NO: 11264 - RNA, 22 nt, Artificial Sequence
  SAMD9L targeting guide sequence portion
augcauauuuaaaacauuaaaa

SEQ ID NO: 11265 - RNA, 22 nt, Artificial Sequence
  SAMD9L targeting guide sequence portion
augcauuuucagacucaaauaa

SEQ ID NO: 11266 - RNA, 22 nt, Artificial Sequence
  SAMD9L targeting guide sequence portion
augccuacccgcagagcuuggc

SEQ ID NO: 11267 - RNA, 22 nt, Artificial Sequence
  SAMD9L targeting guide sequence portion
auggcacuuucauaacauuaug

SEQ ID NO: 11268 - RNA, 22 nt, Artificial Sequence
  SAMD9L targeting guide sequence portion
auggcuaaccucuaauuacaga

SEQ ID NO: 11269 - RNA, 22 nt, Artificial Sequence
  SAMD9L targeting guide sequence portion
auggggaacaauauauuuaccu

SEQ ID NO: 11270 - RNA, 22 nt, Artificial Sequence
  SAMD9L targeting guide sequence portion
auguaaaagagaaagcuuauug

SEQ ID NO: 11271 - RNA, 22 nt, Artificial Sequence
  SAMD9L targeting guide sequence portion
augugaccaguggauaucaaug

SEQ ID NO: 11272 - RNA, 22 nt, Artificial Sequence
  SAMD9L targeting guide sequence portion
auguggaagguaaauauauugu

SEQ ID NO: 11273 - RNA, 22 nt, Artificial Sequence
  SAMD9L targeting guide sequence portion
augugguggauggggaacaaua

SEQ ID NO: 11274 - RNA, 22 nt, Artificial Sequence
  SAMD9L targeting guide sequence portion
auguuaugaaagugccaugaga

SEQ ID NO: 11275 - RNA, 22 nt, Artificial Sequence
  SAMD9L targeting guide sequence portion
auguuuuaaauaugcauuuuca

SEQ ID NO: 11276 - RNA, 22 nt, Artificial Sequence
  SAMD9L targeting guide sequence portion
auuaaaagauugacuccacuuu

SEQ ID NO: 11277 - RNA, 22 nt, Artificial Sequence
  SAMD9L targeting guide sequence portion
auuaagaaguuucauugauauc

SEQ ID NO: 11278 - RNA, 22 nt, Artificial Sequence
  SAMD9L targeting guide sequence portion
auuacaagccuuuuuaagauau

SEQ ID NO: 11279 - RNA, 22 nt, Artificial Sequence
  SAMD9L targeting guide sequence portion
auuacagauuuugcuuuugccu

SEQ ID NO: 11280 - RNA, 22 nt, Artificial Sequence
  SAMD9L targeting guide sequence portion
auuagagguuagccauaauguu

SEQ ID NO: 11281 - RNA, 22 nt, Artificial Sequence
  SAMD9L targeting guide sequence portion
auuauggcuaaccucuaauuac

SEQ ID NO: 11282 - RNA, 22 nt, Artificial Sequence
  SAMD9L targeting guide sequence portion
auuauuucuucacugugacagc

SEQ ID NO: 11283 - RNA, 22 nt, Artificial Sequence
  SAMD9L targeting guide sequence portion
auuauuugagucugaaaaugca

SEQ ID NO: 11284 - RNA, 22 nt, Artificial Sequence
  SAMD9L targeting guide sequence portion
auucagggaggcaaaagcaaaa

SEQ ID NO: 11285 - RNA, 22 nt, Artificial Sequence
  SAMD9L targeting guide sequence portion
auucaucuuauuuaaaucuuug

SEQ ID NO: 11286 - RNA, 22 nt, Artificial Sequence
  SAMD9L targeting guide sequence portion
auucauucagggaggcaaaagc

SEQ ID NO: 11287 - RNA, 22 nt, Artificial Sequence
  SAMD9L targeting guide sequence portion
auucucauggcacuuucauaac

SEQ ID NO: 11288 - RNA, 22 nt, Artificial Sequence
  SAMD9L targeting guide sequence portion
auucucucucucuauucucaug

SEQ ID NO: 11289 - RNA, 22 nt, Artificial Sequence
  SAMD9L targeting guide sequence portion
auugacuccacuuugugccaag

SEQ ID NO: 11290 - RNA, 22 nt, Artificial Sequence
  SAMD9L targeting guide sequence portion
auugaguuuaacacagauuuua

SEQ ID NO: 11291 - RNA, 22 nt, Artificial Sequence
  SAMD9L targeting guide sequence portion
auugauaccaagaugagguaaa

SEQ ID NO: 11292 - RNA, 22 nt, Artificial Sequence
  SAMD9L targeting guide sequence portion
auugauauccacuggucacauc

SEQ ID NO: 11293 - RNA, 22 nt, Artificial Sequence
  SAMD9L targeting guide sequence portion
auugcccuauagacaguuauga

SEQ ID NO: 11294 - RNA, 22 nt, Artificial Sequence
  SAMD9L targeting guide sequence portion
auugcuuuuauaaguuuucuaa

SEQ ID NO: 11295 - RNA, 22 nt, Artificial Sequence
  SAMD9L targeting guide sequence portion
auuggacucaaacccacagauc

SEQ ID NO: 11296 - RNA, 22 nt, Artificial Sequence
  SAMD9L targeting guide sequence portion
auuuaaaacauuaaaagauuga

SEQ ID NO: 11297 - RNA, 22 nt, Artificial Sequence
  SAMD9L targeting guide sequence portion
auuuaaauaagaugaauguaaa

SEQ ID NO: 11298 - RNA, 22 nt, Artificial Sequence
  SAMD9L targeting guide sequence portion
auuuaaaucuuugcugucacag

SEQ ID NO: 11299 - RNA, 22 nt, Artificial Sequence
  SAMD9L targeting guide sequence portion
auuuaccucaucuugguaucaa

SEQ ID NO: 11300 - RNA, 22 nt, Artificial Sequence
  SAMD9L targeting guide sequence portion
auuuagaaaacuuauaaaagca

SEQ ID NO: 11301 - RNA, 22 nt, Artificial Sequence
  SAMD9L targeting guide sequence portion
auuuauaucuuuaugauuuuau

SEQ ID NO: 11302 - RNA, 22 nt, Artificial Sequence
  SAMD9L targeting guide sequence portion
auuucauaucuuaaaaaggcuu

SEQ ID NO: 11303 - RNA, 22 nt, Artificial Sequence
  SAMD9L targeting guide sequence portion
auuucuucacugugacagcaaa

SEQ ID NO: 11304 - RNA, 22 nt, Artificial Sequence
  SAMD9L targeting guide sequence portion
auuugagucugaaaaugcauau

SEQ ID NO: 11305 - RNA, 22 nt, Artificial Sequence
  SAMD9L targeting guide sequence portion
auuuuauucucucucucuauuc

SEQ ID NO: 11306 - RNA, 22 nt, Artificial Sequence
  SAMD9L targeting guide sequence portion
auuuuauugcccuauagacagu

SEQ ID NO: 11307 - RNA, 22 nt, Artificial Sequence
  SAMD9L targeting guide sequence portion
auuuucagacucaaauaauuaa

SEQ ID NO: 11308 - RNA, 22 nt, Artificial Sequence
  SAMD9L targeting guide sequence portion
auuuugcuuuugccucccugaa

SEQ ID NO: 11309 - RNA, 22 nt, Artificial Sequence
  SAMD9L targeting guide sequence portion
caaaagcaaaaucuguaauuag

SEQ ID NO: 11310 - RNA, 22 nt, Artificial Sequence
  SAMD9L targeting guide sequence portion
caaaaucuguaauuagagguua

SEQ ID NO: 11311 - RNA, 22 nt, Artificial Sequence
  SAMD9L targeting guide sequence portion
caaacccacagauccacaccag

SEQ ID NO: 11312 - RNA, 22 nt, Artificial Sequence
  SAMD9L targeting guide sequence portion
caaagauuuaaauaagaugaau

SEQ ID NO: 11313 - RNA, 22 nt, Artificial Sequence
  SAMD9L targeting guide sequence portion
caaaguggagucaaucuuuuaa

SEQ ID NO: 11314 - RNA, 22 nt, Artificial Sequence
  SAMD9L targeting guide sequence portion
caaauaauuaagaaguuucauu

SEQ ID NO: 11315 - RNA, 22 nt, Artificial Sequence
  SAMD9L targeting guide sequence portion
caaauacguuuauuuauaucuu

SEQ ID NO: 11316 - RNA, 22 nt, Artificial Sequence
  SAMD9L targeting guide sequence portion
caagaugagguaaauagaacuc

SEQ ID NO: 11317 - RNA, 22 nt, Artificial Sequence
  SAMD9L targeting guide sequence portion
caagccuuuuuaagauaugaaa

SEQ ID NO: 11318 - RNA, 22 nt, Artificial Sequence
  SAMD9L targeting guide sequence portion
caagcucugcggguaggcauau

SEQ ID NO: 11319 - RNA, 22 nt, Artificial Sequence
  SAMD9L targeting guide sequence portion
caauaaaaucuguguuaaacuc

SEQ ID NO: 11320 - RNA, 22 nt, Artificial Sequence
  SAMD9L targeting guide sequence portion
caauaagcuuucucuuuuacau

SEQ ID NO: 11321 - RNA, 22 nt, Artificial Sequence
  SAMD9L targeting guide sequence portion
caaucuuuuaauguuuuaaaua

SEQ ID NO: 11322 - RNA, 22 nt, Artificial Sequence
  SAMD9L targeting guide sequence portion
caaugaaacuucuuaauuauuu

SEQ ID NO: 11323 - RNA, 22 nt, Artificial Sequence
  SAMD9L targeting guide sequence portion
caauugaguuuaacacagauuu

SEQ ID NO: 11324 - RNA, 22 nt, Artificial Sequence
  SAMD9L targeting guide sequence portion
caauugcuuuuauaaguuuucu

SEQ ID NO: 11325 - RNA, 22 nt, Artificial Sequence
  SAMD9L targeting guide sequence portion
cacaaaguggagucaaucuuuu

SEQ ID NO: 11326 - RNA, 22 nt, Artificial Sequence
  SAMD9L targeting guide sequence portion
cacaccagaguucuauuuaccu

SEQ ID NO: 11327 - RNA, 22 nt, Artificial Sequence
  SAMD9L targeting guide sequence portion
cacagauccacaccagaguucu

SEQ ID NO: 11328 - RNA, 22 nt, Artificial Sequence
  SAMD9L targeting guide sequence portion
cacagauuuuauugcccuauag

SEQ ID NO: 11329 - RNA, 22 nt, Artificial Sequence
  SAMD9L targeting guide sequence portion
cacagugaagaaauaauuuaga

SEQ ID NO: 11330 - RNA, 22 nt, Artificial Sequence
  SAMD9L targeting guide sequence portion
cacaucauaacugucuauaggg

SEQ ID NO: 11331 - RNA, 22 nt, Artificial Sequence
  SAMD9L targeting guide sequence portion
caccagaguucuauuuaccuca

SEQ ID NO: 11332 - RNA, 22 nt, Artificial Sequence
  SAMD9L targeting guide sequence portion
cacuggucacaucauaacuguc

SEQ ID NO: 11333 - RNA, 22 nt, Artificial Sequence
  SAMD9L targeting guide sequence portion
cacugugacagcaaagauuuaa

SEQ ID NO: 11334 - RNA, 22 nt, Artificial Sequence
  SAMD9L targeting guide sequence portion
cacuuucauaacauuauggcua

SEQ ID NO: 11335 - RNA, 22 nt, Artificial Sequence
  SAMD9L targeting guide sequence portion
cacuuugugccaagcucugcgg

SEQ ID NO: 11336 - RNA, 22 nt, Artificial Sequence
  SAMD9L targeting guide sequence portion
cagacucaaauaauuaagaagu

SEQ ID NO: 11337 - RNA, 22 nt, Artificial Sequence
  SAMD9L targeting guide sequence portion
cagagcuuggcacaaaguggag

SEQ ID NO: 11338 - RNA, 22 nt, Artificial Sequence
  SAMD9L targeting guide sequence portion
cagaguucuauuuaccucaucu

SEQ ID NO: 11339 - RNA, 22 nt, Artificial Sequence
  SAMD9L targeting guide sequence portion
cagauccacaccagaguucuau

SEQ ID NO: 11340 - RNA, 22 nt, Artificial Sequence
  SAMD9L targeting guide sequence portion
cagauuuuauugcccuauagac

SEQ ID NO: 11341 - RNA, 22 nt, Artificial Sequence
  SAMD9L targeting guide sequence portion
cagauuuugcuuuugccucccu

SEQ ID NO: 11342 - RNA, 22 nt, Artificial Sequence
  SAMD9L targeting guide sequence portion
cagcaaagauuuaaauaagaug

SEQ ID NO: 11343 - RNA, 22 nt, Artificial Sequence
  SAMD9L targeting guide sequence portion
cagggaggcaaaagcaaaaucu

SEQ ID NO: 11344 - RNA, 22 nt, Artificial Sequence
  SAMD9L targeting guide sequence portion
cagugaagaaauaauuuagaaa

SEQ ID NO: 11345 - RNA, 22 nt, Artificial Sequence
  SAMD9L targeting guide sequence portion
caguggauaucaaugaaacuuc

SEQ ID NO: 11346 - RNA, 22 nt, Artificial Sequence
  SAMD9L targeting guide sequence portion
caguuaugaugugaccagugga

SEQ ID NO: 11347 - RNA, 22 nt, Artificial Sequence
  SAMD9L targeting guide sequence portion
cauaaagauauaaauaaacgua

SEQ ID NO: 11348 - RNA, 22 nt, Artificial Sequence
  SAMD9L targeting guide sequence portion
cauaacauuauggcuaaccucu

SEQ ID NO: 11349 - RNA, 22 nt, Artificial Sequence
  SAMD9L targeting guide sequence portion
cauaacugucuauagggcaaua

SEQ ID NO: 11350 - RNA, 22 nt, Artificial Sequence
  SAMD9L targeting guide sequence portion
cauaauguuaugaaagugccau

SEQ ID NO: 11351 - RNA, 22 nt, Artificial Sequence
  SAMD9L targeting guide sequence portion
cauaucuuaaaaaggcuuguaa

SEQ ID NO: 11352 - RNA, 22 nt, Artificial Sequence
  SAMD9L targeting guide sequence portion
cauauuuaaaacauuaaaagau

SEQ ID NO: 11353 - RNA, 22 nt, Artificial Sequence
  SAMD9L targeting guide sequence portion
cauauuucauaucuuaaaaagg

SEQ ID NO: 11354 - RNA, 22 nt, Artificial Sequence
  SAMD9L targeting guide sequence portion
caucauaacugucuauagggca

SEQ ID NO: 11355 - RNA, 22 nt, Artificial Sequence
  SAMD9L targeting guide sequence portion
caucuuauuuaaaucuuugcug

SEQ ID NO: 11356 - RNA, 22 nt, Artificial Sequence
  SAMD9L targeting guide sequence portion
caugagaauagagagagagaau

SEQ ID NO: 11357 - RNA, 22 nt, Artificial Sequence
  SAMD9L targeting guide sequence portion
cauggcacuuucauaacauuau

SEQ ID NO: 11358 - RNA, 22 nt, Artificial Sequence
  SAMD9L targeting guide sequence portion
cauuaaaagauugacuccacuu

SEQ ID NO: 11359 - RNA, 22 nt, Artificial Sequence
  SAMD9L targeting guide sequence portion
cauuauggcuaaccucuaauua

SEQ ID NO: 11360 - RNA, 22 nt, Artificial Sequence
  SAMD9L targeting guide sequence portion
cauucagggaggcaaaagcaaa

SEQ ID NO: 11361 - RNA, 22 nt, Artificial Sequence
  SAMD9L targeting guide sequence portion
cauucaucuuauuuaaaucuuu

SEQ ID NO: 11362 - RNA, 22 nt, Artificial Sequence
  SAMD9L targeting guide sequence portion
cauugauauccacuggucacau

SEQ ID NO: 11363 - RNA, 22 nt, Artificial Sequence
  SAMD9L targeting guide sequence portion
cauuuucagacucaaauaauua

SEQ ID NO: 11364 - RNA, 22 nt, Artificial Sequence
  SAMD9L targeting guide sequence portion
ccaagaugagguaaauagaacu

SEQ ID NO: 11365 - RNA, 22 nt, Artificial Sequence
  SAMD9L targeting guide sequence portion
ccaagcucugcggguaggcaua

SEQ ID NO: 11366 - RNA, 22 nt, Artificial Sequence
  SAMD9L targeting guide sequence portion
ccaauaagcuuucucuuuuaca

SEQ ID NO: 11367 - RNA, 22 nt, Artificial Sequence
  SAMD9L targeting guide sequence portion
ccacaccagaguucuauuuacc

SEQ ID NO: 11368 - RNA, 22 nt, Artificial Sequence
  SAMD9L targeting guide sequence portion
ccacagauccacaccagaguuc

SEQ ID NO: 11369 - RNA, 22 nt, Artificial Sequence
  SAMD9L targeting guide sequence portion
ccacuggucacaucauaacugu

SEQ ID NO: 11370 - RNA, 22 nt, Artificial Sequence
  SAMD9L targeting guide sequence portion
ccacuuugugccaagcucugcg

SEQ ID NO: 11371 - RNA, 22 nt, Artificial Sequence
  SAMD9L targeting guide sequence portion
ccagaguucuauuuaccucauc

SEQ ID NO: 11372 - RNA, 22 nt, Artificial Sequence
  SAMD9L targeting guide sequence portion
ccaguggauaucaaugaaacuu

SEQ ID NO: 11373 - RNA, 22 nt, Artificial Sequence
  SAMD9L targeting guide sequence portion
ccauaauguuaugaaagugcca

SEQ ID NO: 11374 - RNA, 22 nt, Artificial Sequence
  SAMD9L targeting guide sequence portion
ccaugagaauagagagagagaa

SEQ ID NO: 11375 - RNA, 22 nt, Artificial Sequence
  SAMD9L targeting guide sequence portion
cccacagauccacaccagaguu

SEQ ID NO: 11376 - RNA, 22 nt, Artificial Sequence
  SAMD9L targeting guide sequence portion
cccgcagagcuuggcacaaagu

SEQ ID NO: 11377 - RNA, 22 nt, Artificial Sequence
  SAMD9L targeting guide sequence portion
cccuauagacaguuaugaugug

SEQ ID NO: 11378 - RNA, 22 nt, Artificial Sequence
  SAMD9L targeting guide sequence portion
cccugaaugaauuacaagccuu

SEQ ID NO: 11379 - RNA, 22 nt, Artificial Sequence
  SAMD9L targeting guide sequence portion
ccgcagagcuuggcacaaagug

SEQ ID NO: 11380 - RNA, 22 nt, Artificial Sequence
  SAMD9L targeting guide sequence portion
ccuacccgcagagcuuggcaca

SEQ ID NO: 11381 - RNA, 22 nt, Artificial Sequence
  SAMD9L targeting guide sequence portion
ccuauagacaguuaugauguga

SEQ ID NO: 11382 - RNA, 22 nt, Artificial Sequence
  SAMD9L targeting guide sequence portion
ccucccugaaugaauuacaagc

SEQ ID NO: 11383 - RNA, 22 nt, Artificial Sequence
  SAMD9L targeting guide sequence portion
ccucuaauuacagauuuugcuu

SEQ ID NO: 11384 - RNA, 22 nt, Artificial Sequence
  SAMD9L targeting guide sequence portion
ccugaaugaauuacaagccuuu

SEQ ID NO: 11385 - RNA, 22 nt, Artificial Sequence
  SAMD9L targeting guide sequence portion
ccuuuuuaagauaugaaauaug

SEQ ID NO: 11386 - RNA, 22 nt, Artificial Sequence
  SAMD9L targeting guide sequence portion
cgcagagcuuggcacaaagugg

SEQ ID NO: 11387 - RNA, 22 nt, Artificial Sequence
  SAMD9L targeting guide sequence portion
cggguaggcauauuucauaucu

SEQ ID NO: 11388 - RNA, 22 nt, Artificial Sequence
  SAMD9L targeting guide sequence portion
cguuuauuuauaucuuuaugau

SEQ ID NO: 11389 - RNA, 22 nt, Artificial Sequence
  SAMD9L targeting guide sequence portion
cuaaauuauuucuucacuguga

SEQ ID NO: 11390 - RNA, 22 nt, Artificial Sequence
  SAMD9L targeting guide sequence portion
cuaaccucuaauuacagauuuu

SEQ ID NO: 11391 - RNA, 22 nt, Artificial Sequence
  SAMD9L targeting guide sequence portion
cuaauuacagauuuugcuuuug

SEQ ID NO: 11392 - RNA, 22 nt, Artificial Sequence
  SAMD9L targeting guide sequence portion
cuacccgcagagcuuggcacaa

SEQ ID NO: 11393 - RNA, 22 nt, Artificial Sequence
  SAMD9L targeting guide sequence portion
cuauagacaguuaugaugugac

SEQ ID NO: 11394 - RNA, 22 nt, Artificial Sequence
  SAMD9L targeting guide sequence portion
cuauagggcaauaaaaucugug

SEQ ID NO: 11395 - RNA, 22 nt, Artificial Sequence
  SAMD9L targeting guide sequence portion
cuauucucauggcacuuucaua

SEQ ID NO: 11396 - RNA, 22 nt, Artificial Sequence
  SAMD9L targeting guide sequence portion
cuauuuaccucaucuugguauc

SEQ ID NO: 11397 - RNA, 22 nt, Artificial Sequence
  SAMD9L targeting guide sequence portion
cucaaacccacagauccacacc

SEQ ID NO: 11398 - RNA, 22 nt, Artificial Sequence
  SAMD9L targeting guide sequence portion
cucaaauaauuaagaaguuuca

SEQ ID NO: 11399 - RNA, 22 nt, Artificial Sequence
  SAMD9L targeting guide sequence portion
cucaauugcuuuuauaaguuuu

SEQ ID NO: 11400 - RNA, 22 nt, Artificial Sequence
  SAMD9L targeting guide sequence portion
cucauggcacuuucauaacauu

SEQ ID NO: 11401 - RNA, 22 nt, Artificial Sequence
  SAMD9L targeting guide sequence portion
cuccacuuugugccaagcucug

SEQ ID NO: 11402 - RNA, 22 nt, Artificial Sequence
  SAMD9L targeting guide sequence portion
cucccugaaugaauuacaagcc

SEQ ID NO: 11403 - RNA, 22 nt, Artificial Sequence
  SAMD9L targeting guide sequence portion
cucuaauuacagauuuugcuuu

SEQ ID NO: 11404 - RNA, 22 nt, Artificial Sequence
  SAMD9L targeting guide sequence portion
cucuauucucauggcacuuuca

SEQ ID NO: 11405 - RNA, 22 nt, Artificial Sequence
  SAMD9L targeting guide sequence portion
cucucuauucucauggcacuuu

SEQ ID NO: 11406 - RNA, 22 nt, Artificial Sequence
  SAMD9L targeting guide sequence portion
cucucucuauucucauggcacu

SEQ ID NO: 11407 - RNA, 22 nt, Artificial Sequence
  SAMD9L targeting guide sequence portion
cucucucucuauucucauggca

SEQ ID NO: 11408 - RNA, 22 nt, Artificial Sequence
  SAMD9L targeting guide sequence portion
cucugcggguaggcauauuuca

SEQ ID NO: 11409 - RNA, 22 nt, Artificial Sequence
  SAMD9L targeting guide sequence portion
cucugguguggaucuguggguu

SEQ ID NO: 11410 - RNA, 22 nt, Artificial Sequence
  SAMD9L targeting guide sequence portion
cucuuuuacauucaucuuauuu

SEQ ID NO: 11411 - RNA, 22 nt, Artificial Sequence
  SAMD9L targeting guide sequence portion
cugaaaaugcauauuuaaaaca

SEQ ID NO: 11412 - RNA, 22 nt, Artificial Sequence
  SAMD9L targeting guide sequence portion
cugaaugaauuacaagccuuuu

SEQ ID NO: 11413 - RNA, 22 nt, Artificial Sequence
  SAMD9L targeting guide sequence portion
cugcggguaggcauauuucaua

SEQ ID NO: 11414 - RNA, 22 nt, Artificial Sequence
  SAMD9L targeting guide sequence portion
cuggucacaucauaacugucua

SEQ ID NO: 11415 - RNA, 22 nt, Artificial Sequence
  SAMD9L targeting guide sequence portion
cugguguggaucuguggguuug

SEQ ID NO: 11416 - RNA, 22 nt, Artificial Sequence
  SAMD9L targeting guide sequence portion
cuguaauuagagguuagccaua

SEQ ID NO: 11417 - RNA, 22 nt, Artificial Sequence
  SAMD9L targeting guide sequence portion
cugucacagugaagaaauaauu

SEQ ID NO: 11418 - RNA, 22 nt, Artificial Sequence
  SAMD9L targeting guide sequence portion
cugucuauagggcaauaaaauc

SEQ ID NO: 11419 - RNA, 22 nt, Artificial Sequence
  SAMD9L targeting guide sequence portion
cugugacagcaaagauuuaaau

SEQ ID NO: 11420 - RNA, 22 nt, Artificial Sequence
  SAMD9L targeting guide sequence portion
cuguggguuugaguccaauaag

SEQ ID NO: 11421 - RNA, 22 nt, Artificial Sequence
  SAMD9L targeting guide sequence portion
cuguguuaaacucaauugcuuu

SEQ ID NO: 11422 - RNA, 22 nt, Artificial Sequence
  SAMD9L targeting guide sequence portion
cuuaaaaaggcuuguaauucau

SEQ ID NO: 11423 - RNA, 22 nt, Artificial Sequence
  SAMD9L targeting guide sequence portion
cuuaauuauuugagucugaaaa

SEQ ID NO: 11424 - RNA, 22 nt, Artificial Sequence
  SAMD9L targeting guide sequence portion
cuuauaaaagcaauugaguuua

SEQ ID NO: 11425 - RNA, 22 nt, Artificial Sequence
  SAMD9L targeting guide sequence portion
cuuauuggacucaaacccacag

SEQ ID NO: 11426 - RNA, 22 nt, Artificial Sequence
  SAMD9L targeting guide sequence portion
cuuauuuaaaucuuugcuguca

SEQ ID NO: 11427 - RNA, 22 nt, Artificial Sequence
  SAMD9L targeting guide sequence portion
cuucacugugacagcaaagauu

SEQ ID NO: 11428 - RNA, 22 nt, Artificial Sequence
  SAMD9L targeting guide sequence portion
cuucuuaauuauuugagucuga

SEQ ID NO: 11429 - RNA, 22 nt, Artificial Sequence
  SAMD9L targeting guide sequence portion
cuuggcacaaaguggagucaau

SEQ ID NO: 11430 - RNA, 22 nt, Artificial Sequence
  SAMD9L targeting guide sequence portion
cuuguaauucauucagggaggc

SEQ ID NO: 11431 - RNA, 22 nt, Artificial Sequence
  SAMD9L targeting guide sequence portion
cuuuaugauuuuauucucucuc

SEQ ID NO: 11432 - RNA, 22 nt, Artificial Sequence
  SAMD9L targeting guide sequence portion
cuuucauaacauuauggcuaac

SEQ ID NO: 11433 - RNA, 22 nt, Artificial Sequence
  SAMD9L targeting guide sequence portion
cuuucucuuuuacauucaucuu

SEQ ID NO: 11434 - RNA, 22 nt, Artificial Sequence
  SAMD9L targeting guide sequence portion
cuuugcugucacagugaagaaa

SEQ ID NO: 11435 - RNA, 22 nt, Artificial Sequence
  SAMD9L targeting guide sequence portion
cuuugugccaagcucugcgggu

SEQ ID NO: 11436 - RNA, 22 nt, Artificial Sequence
  SAMD9L targeting guide sequence portion
cuuuuaauguuuuaaauaugca

SEQ ID NO: 11437 - RNA, 22 nt, Artificial Sequence
  SAMD9L targeting guide sequence portion
cuuuuacauucaucuuauuuaa

SEQ ID NO: 11438 - RNA, 22 nt, Artificial Sequence
  SAMD9L targeting guide sequence portion
cuuuuauaaguuuucuaaauua

SEQ ID NO: 11439 - RNA, 22 nt, Artificial Sequence
  SAMD9L targeting guide sequence portion
cuuuugccucccugaaugaauu

SEQ ID NO: 11440 - RNA, 22 nt, Artificial Sequence
  SAMD9L targeting guide sequence portion
cuuuuuaagauaugaaauaugc

SEQ ID NO: 11441 - RNA, 22 nt, Artificial Sequence
  SAMD9L targeting guide sequence portion
gaaaacuuauaaaagcaauuga

SEQ ID NO: 11442 - RNA, 22 nt, Artificial Sequence
  SAMD9L targeting guide sequence portion
gaaaaugcauauuuaaaacauu

SEQ ID NO: 11443 - RNA, 22 nt, Artificial Sequence
  SAMD9L targeting guide sequence portion
gaaacuucuuaauuauuugagu

SEQ ID NO: 11444 - RNA, 22 nt, Artificial Sequence
  SAMD9L targeting guide sequence portion
gaaagcuuauuggacucaaacc

SEQ ID NO: 11445 - RNA, 22 nt, Artificial Sequence
  SAMD9L targeting guide sequence portion
gaaagugccaugagaauagaga

SEQ ID NO: 11446 - RNA, 22 nt, Artificial Sequence
  SAMD9L targeting guide sequence portion
gaaauaauuuagaaaacuuaua

SEQ ID NO: 11447 - RNA, 22 nt, Artificial Sequence
  SAMD9L targeting guide sequence portion
gaaauaugccuacccgcagagc

SEQ ID NO: 11448 - RNA, 22 nt, Artificial Sequence
  SAMD9L targeting guide sequence portion
gaacucugguguggaucugugg

SEQ ID NO: 11449 - RNA, 22 nt, Artificial Sequence
  SAMD9L targeting guide sequence portion
gaagaaauaauuuagaaaacuu

SEQ ID NO: 11450 - RNA, 22 nt, Artificial Sequence
  SAMD9L targeting guide sequence portion
gaagguaaauauauuguucccc

SEQ ID NO: 11451 - RNA, 22 nt, Artificial Sequence
  SAMD9L targeting guide sequence portion
gaaguuucauugauauccacug

SEQ ID NO: 11452 - RNA, 22 nt, Artificial Sequence
  SAMD9L targeting guide sequence portion
gaauaaaaucauaaagauauaa

SEQ ID NO: 11453 - RNA, 22 nt, Artificial Sequence
  SAMD9L targeting guide sequence portion
gaauagagagagagaauaaaau

SEQ ID NO: 11454 - RNA, 22 nt, Artificial Sequence
  SAMD9L targeting guide sequence portion
gaaugaauuacaagccuuuuua

SEQ ID NO: 11455 - RNA, 22 nt, Artificial Sequence
  SAMD9L targeting guide sequence portion
gaauguaaaagagaaagcuuau

SEQ ID NO: 11456 - RNA, 22 nt, Artificial Sequence
  SAMD9L targeting guide sequence portion
gaauuacaagccuuuuuaagau

SEQ ID NO: 11457 - RNA, 22 nt, Artificial Sequence
  SAMD9L targeting guide sequence portion
gacagcaaagauuuaaauaaga

SEQ ID NO: 11458 - RNA, 22 nt, Artificial Sequence
  SAMD9L targeting guide sequence portion
gacaguuaugaugugaccagug

SEQ ID NO: 11459 - RNA, 22 nt, Artificial Sequence
  SAMD9L targeting guide sequence portion
gaccaguggauaucaaugaaac

SEQ ID NO: 11460 - RNA, 22 nt, Artificial Sequence
  SAMD9L targeting guide sequence portion
gacucaaacccacagauccaca

SEQ ID NO: 11461 - RNA, 22 nt, Artificial Sequence
  SAMD9L targeting guide sequence portion
gacucaaauaauuaagaaguuu

SEQ ID NO: 11462 - RNA, 22 nt, Artificial Sequence
  SAMD9L targeting guide sequence portion
gacuccacuuugugccaagcuc

SEQ ID NO: 11463 - RNA, 22 nt, Artificial Sequence
  SAMD9L targeting guide sequence portion
gagaaagcuuauuggacucaaa

SEQ ID NO: 11464 - RNA, 22 nt, Artificial Sequence
  SAMD9L targeting guide sequence portion
gagaauaaaaucauaaagauau

SEQ ID NO: 11465 - RNA, 22 nt, Artificial Sequence
  SAMD9L targeting guide sequence portion
gagaauagagagagagaauaaa

SEQ ID NO: 11466 - RNA, 22 nt, Artificial Sequence
  SAMD9L targeting guide sequence portion
gagagaauaaaaucauaaagau

SEQ ID NO: 11467 - RNA, 22 nt, Artificial Sequence
  SAMD9L targeting guide sequence portion
gagagagaauaaaaucauaaag

SEQ ID NO: 11468 - RNA, 22 nt, Artificial Sequence
  SAMD9L targeting guide sequence portion
gagagagagaauaaaaucauaa

SEQ ID NO: 11469 - RNA, 22 nt, Artificial Sequence
  SAMD9L targeting guide sequence portion
gagcuuggcacaaaguggaguc

SEQ ID NO: 11470 - RNA, 22 nt, Artificial Sequence
  SAMD9L targeting guide sequence portion
gaggcaaaagcaaaaucuguaa

SEQ ID NO: 11471 - RNA, 22 nt, Artificial Sequence
  SAMD9L targeting guide sequence portion
gagguaaauagaacucuggugu

SEQ ID NO: 11472 - RNA, 22 nt, Artificial Sequence
  SAMD9L targeting guide sequence portion
gagguuagccauaauguuauga

SEQ ID NO: 11473 - RNA, 22 nt, Artificial Sequence
  SAMD9L targeting guide sequence portion
gagucaaucuuuuaauguuuua

SEQ ID NO: 11474 - RNA, 22 nt, Artificial Sequence
  SAMD9L targeting guide sequence portion
gaguccaauaagcuuucucuuu

SEQ ID NO: 11475 - RNA, 22 nt, Artificial Sequence
  SAMD9L targeting guide sequence portion
gagucugaaaaugcauauuuaa

SEQ ID NO: 11476 - RNA, 22 nt, Artificial Sequence
  SAMD9L targeting guide sequence portion
gaguucuauuuaccucaucuug

SEQ ID NO: 11477 - RNA, 22 nt, Artificial Sequence
  SAMD9L targeting guide sequence portion
gaguuuaacacagauuuuauug

SEQ ID NO: 11478 - RNA, 22 nt, Artificial Sequence
  SAMD9L targeting guide sequence portion
gauaccaagaugagguaaauag

SEQ ID NO: 11479 - RNA, 22 nt, Artificial Sequence
  SAMD9L targeting guide sequence portion
gauauaaauaaacguauuugaa

SEQ ID NO: 11480 - RNA, 22 nt, Artificial Sequence
  SAMD9L targeting guide sequence portion
gauaucaaugaaacuucuuaau

SEQ ID NO: 11481 - RNA, 22 nt, Artificial Sequence
  SAMD9L targeting guide sequence portion
gauauccacuggucacaucaua

SEQ ID NO: 11482 - RNA, 22 nt, Artificial Sequence
  SAMD9L targeting guide sequence portion
gauaugaaauaugccuacccgc

SEQ ID NO: 11483 - RNA, 22 nt, Artificial Sequence
  SAMD9L targeting guide sequence portion
gauccacaccagaguucuauuu

SEQ ID NO: 11484 - RNA, 22 nt, Artificial Sequence
  SAMD9L targeting guide sequence portion
gaucuguggguuugaguccaau

SEQ ID NO: 11485 - RNA, 22 nt, Artificial Sequence
  SAMD9L targeting guide sequence portion
gaugaauguaaaagagaaagcu

SEQ ID NO: 11486 - RNA, 22 nt, Artificial Sequence
  SAMD9L targeting guide sequence portion
gaugagguaaauagaacucugg

SEQ ID NO: 11487 - RNA, 22 nt, Artificial Sequence
  SAMD9L targeting guide sequence portion
gauggggaacaauauauuuacc

SEQ ID NO: 11488 - RNA, 22 nt, Artificial Sequence
  SAMD9L targeting guide sequence portion
gaugugaccaguggauaucaau

SEQ ID NO: 11489 - RNA, 22 nt, Artificial Sequence
  SAMD9L targeting guide sequence portion
gauugacuccacuuugugccaa

SEQ ID NO: 11490 - RNA, 22 nt, Artificial Sequence
  SAMD9L targeting guide sequence portion
gauuuaaauaagaugaauguaa

SEQ ID NO: 11491 - RNA, 22 nt, Artificial Sequence
  SAMD9L targeting guide sequence portion
gauuuuauucucucucucuauu

SEQ ID NO: 11492 - RNA, 22 nt, Artificial Sequence
  SAMD9L targeting guide sequence portion
gauuuuauugcccuauagacag

SEQ ID NO: 11493 - RNA, 22 nt, Artificial Sequence
  SAMD9L targeting guide sequence portion
gauuuugcuuuugccucccuga

SEQ ID NO: 11494 - RNA, 22 nt, Artificial Sequence
  SAMD9L targeting guide sequence portion
gcaaaagcaaaaucuguaauua

SEQ ID NO: 11495 - RNA, 22 nt, Artificial Sequence
  SAMD9L targeting guide sequence portion
gcaaaaucuguaauuagagguu

SEQ ID NO: 11496 - RNA, 22 nt, Artificial Sequence
  SAMD9L targeting guide sequence portion
gcaaagauuuaaauaagaugaa

SEQ ID NO: 11497 - RNA, 22 nt, Artificial Sequence
  SAMD9L targeting guide sequence portion
gcaauaaaaucuguguuaaacu

SEQ ID NO: 11498 - RNA, 22 nt, Artificial Sequence
  SAMD9L targeting guide sequence portion
gcaauugaguuuaacacagauu

SEQ ID NO: 11499 - RNA, 22 nt, Artificial Sequence
  SAMD9L targeting guide sequence portion
gcacaaaguggagucaaucuuu

SEQ ID NO: 11500 - RNA, 22 nt, Artificial Sequence
  SAMD9L targeting guide sequence portion
gcacuuucauaacauuauggcu

SEQ ID NO: 11501 - RNA, 22 nt, Artificial Sequence
  SAMD9L targeting guide sequence portion
gcagagcuuggcacaaagugga

SEQ ID NO: 11502 - RNA, 22 nt, Artificial Sequence
  SAMD9L targeting guide sequence portion
gcauauuuaaaacauuaaaaga

SEQ ID NO: 11503 - RNA, 22 nt, Artificial Sequence
  SAMD9L targeting guide sequence portion
gcauauuucauaucuuaaaaag

SEQ ID NO: 11504 - RNA, 22 nt, Artificial Sequence
  SAMD9L targeting guide sequence portion
gcauuuucagacucaaauaauu

SEQ ID NO: 11505 - RNA, 22 nt, Artificial Sequence
  SAMD9L targeting guide sequence portion
gccaagcucugcggguaggcau

SEQ ID NO: 11506 - RNA, 22 nt, Artificial Sequence
  SAMD9L targeting guide sequence portion
gccauaauguuaugaaagugcc

SEQ ID NO: 11507 - RNA, 22 nt, Artificial Sequence
  SAMD9L targeting guide sequence portion
gccaugagaauagagagagaga

SEQ ID NO: 11508 - RNA, 22 nt, Artificial Sequence
  SAMD9L targeting guide sequence portion
gcccuauagacaguuaugaugu

SEQ ID NO: 11509 - RNA, 22 nt, Artificial Sequence
  SAMD9L targeting guide sequence portion
gccuacccgcagagcuuggcac

SEQ ID NO: 11510 - RNA, 22 nt, Artificial Sequence
  SAMD9L targeting guide sequence portion
gccucccugaaugaauuacaag

SEQ ID NO: 11511 - RNA, 22 nt, Artificial Sequence
  SAMD9L targeting guide sequence portion
gccuuuuuaagauaugaaauau

SEQ ID NO: 11512 - RNA, 22 nt, Artificial Sequence
  SAMD9L targeting guide sequence portion
gcggguaggcauauuucauauc

SEQ ID NO: 11513 - RNA, 22 nt, Artificial Sequence
  SAMD9L targeting guide sequence portion
gcuaaccucuaauuacagauuu

SEQ ID NO: 11514 - RNA, 22 nt, Artificial Sequence
  SAMD9L targeting guide sequence portion
gcucugcggguaggcauauuuc

SEQ ID NO: 11515 - RNA, 22 nt, Artificial Sequence
  SAMD9L targeting guide sequence portion
gcugucacagugaagaaauaau

SEQ ID NO: 11516 - RNA, 22 nt, Artificial Sequence
  SAMD9L targeting guide sequence portion
gcuuauuggacucaaacccaca

SEQ ID NO: 11517 - RNA, 22 nt, Artificial Sequence
  SAMD9L targeting guide sequence portion
gcuuggcacaaaguggagucaa

SEQ ID NO: 11518 - RNA, 22 nt, Artificial Sequence
  SAMD9L targeting guide sequence portion
gcuuguaauucauucagggagg

SEQ ID NO: 11519 - RNA, 22 nt, Artificial Sequence
  SAMD9L targeting guide sequence portion
gcuuucucuuuuacauucaucu

SEQ ID NO: 11520 - RNA, 22 nt, Artificial Sequence
  SAMD9L targeting guide sequence portion
gcuuuuauaaguuuucuaaauu

SEQ ID NO: 11521 - RNA, 22 nt, Artificial Sequence
  SAMD9L targeting guide sequence portion
gcuuuugccucccugaaugaau

SEQ ID NO: 11522 - RNA, 22 nt, Artificial Sequence
  SAMD9L targeting guide sequence portion
ggaagguaaauauauuguuccc

SEQ ID NO: 11523 - RNA, 22 nt, Artificial Sequence
  SAMD9L targeting guide sequence portion
ggacucaaacccacagauccac

SEQ ID NO: 11524 - RNA, 22 nt, Artificial Sequence
  SAMD9L targeting guide sequence portion
ggaggcaaaagcaaaaucugua

SEQ ID NO: 11525 - RNA, 22 nt, Artificial Sequence
  SAMD9L targeting guide sequence portion
ggagucaaucuuuuaauguuuu

SEQ ID NO: 11526 - RNA, 22 nt, Artificial Sequence
  SAMD9L targeting guide sequence portion
ggauaucaaugaaacuucuuaa

SEQ ID NO: 11527 - RNA, 22 nt, Artificial Sequence
  SAMD9L targeting guide sequence portion
ggaucuguggguuugaguccaa

SEQ ID NO: 11528 - RNA, 22 nt, Artificial Sequence
  SAMD9L targeting guide sequence portion
ggauggggaacaauauauuuac

SEQ ID NO: 11529 - RNA, 22 nt, Artificial Sequence
  SAMD9L targeting guide sequence portion
ggcaaaagcaaaaucuguaauu

SEQ ID NO: 11530 - RNA, 22 nt, Artificial Sequence
  SAMD9L targeting guide sequence portion
ggcaauaaaaucuguguuaaac

SEQ ID NO: 11531 - RNA, 22 nt, Artificial Sequence
  SAMD9L targeting guide sequence portion
ggcacaaaguggagucaaucuu

SEQ ID NO: 11532 - RNA, 22 nt, Artificial Sequence
  SAMD9L targeting guide sequence portion
ggcacuuucauaacauuauggc

SEQ ID NO: 11533 - RNA, 22 nt, Artificial Sequence
  SAMD9L targeting guide sequence portion
ggcauauuucauaucuuaaaaa

SEQ ID NO: 11534 - RNA, 22 nt, Artificial Sequence
  SAMD9L targeting guide sequence portion
ggcuaaccucuaauuacagauu

SEQ ID NO: 11535 - RNA, 22 nt, Artificial Sequence
  SAMD9L targeting guide sequence portion
ggcuuguaauucauucagggag

SEQ ID NO: 11536 - RNA, 22 nt, Artificial Sequence
  SAMD9L targeting guide sequence portion
gggaggcaaaagcaaaaucugu

SEQ ID NO: 11537 - RNA, 22 nt, Artificial Sequence
  SAMD9L targeting guide sequence portion
gggcaauaaaaucuguguuaaa

SEQ ID NO: 11538 - RNA, 22 nt, Artificial Sequence
  SAMD9L targeting guide sequence portion
ggguaggcauauuucauaucuu

SEQ ID NO: 11539 - RNA, 22 nt, Artificial Sequence
  SAMD9L targeting guide sequence portion
ggguuugaguccaauaagcuuu

SEQ ID NO: 11540 - RNA, 22 nt, Artificial Sequence
  SAMD9L targeting guide sequence portion
gguaaauagaacucuggugugg

SEQ ID NO: 11541 - RNA, 22 nt, Artificial Sequence
  SAMD9L targeting guide sequence portion
gguaaauauauuguuccccauc

SEQ ID NO: 11542 - RNA, 22 nt, Artificial Sequence
  SAMD9L targeting guide sequence portion
gguaggcauauuucauaucuua

SEQ ID NO: 11543 - RNA, 22 nt, Artificial Sequence
  SAMD9L targeting guide sequence portion
ggucacaucauaacugucuaua

SEQ ID NO: 11544 - RNA, 22 nt, Artificial Sequence
  SAMD9L targeting guide sequence portion
gguggauggggaacaauauauu

SEQ ID NO: 11545 - RNA, 22 nt, Artificial Sequence
  SAMD9L targeting guide sequence portion
gguguggaucuguggguuugag

SEQ ID NO: 11546 - RNA, 22 nt, Artificial Sequence
  SAMD9L targeting guide sequence portion
gguuagccauaauguuaugaaa

SEQ ID NO: 11547 - RNA, 22 nt, Artificial Sequence
  SAMD9L targeting guide sequence portion
gguuugaguccaauaagcuuuc

SEQ ID NO: 11548 - RNA, 22 nt, Artificial Sequence
  SAMD9L targeting guide sequence portion
guaaaagagaaagcuuauugga

SEQ ID NO: 11549 - RNA, 22 nt, Artificial Sequence
  SAMD9L targeting guide sequence portion
guaaauagaacucuggugugga

SEQ ID NO: 11550 - RNA, 22 nt, Artificial Sequence
  SAMD9L targeting guide sequence portion
guaaauauauuguuccccaucc

SEQ ID NO: 11551 - RNA, 22 nt, Artificial Sequence
  SAMD9L targeting guide sequence portion
guaauuagagguuagccauaau

SEQ ID NO: 11552 - RNA, 22 nt, Artificial Sequence
  SAMD9L targeting guide sequence portion
guaauucauucagggaggcaaa

SEQ ID NO: 11553 - RNA, 22 nt, Artificial Sequence
  SAMD9L targeting guide sequence portion
guaggcauauuucauaucuuaa

SEQ ID NO: 11554 - RNA, 22 nt, Artificial Sequence
  SAMD9L targeting guide sequence portion
gucaaucuuuuaauguuuuaaa

SEQ ID NO: 11555 - RNA, 22 nt, Artificial Sequence
  SAMD9L targeting guide sequence portion
gucacagugaagaaauaauuua

SEQ ID NO: 11556 - RNA, 22 nt, Artificial Sequence
  SAMD9L targeting guide sequence portion
gucacaucauaacugucuauag

SEQ ID NO: 11557 - RNA, 22 nt, Artificial Sequence
  SAMD9L targeting guide sequence portion
guccaauaagcuuucucuuuua

SEQ ID NO: 11558 - RNA, 22 nt, Artificial Sequence
  SAMD9L targeting guide sequence portion
gucuauagggcaauaaaaucug

SEQ ID NO: 11559 - RNA, 22 nt, Artificial Sequence
  SAMD9L targeting guide sequence portion
gucugaaaaugcauauuuaaaa

SEQ ID NO: 11560 - RNA, 22 nt, Artificial Sequence
  SAMD9L targeting guide sequence portion
gugaagaaauaauuuagaaaac

SEQ ID NO: 11561 - RNA, 22 nt, Artificial Sequence
  SAMD9L targeting guide sequence portion
gugacagcaaagauuuaaauaa

SEQ ID NO: 11562 - RNA, 22 nt, Artificial Sequence
  SAMD9L targeting guide sequence portion
gugaccaguggauaucaaugaa

SEQ ID NO: 11563 - RNA, 22 nt, Artificial Sequence
  SAMD9L targeting guide sequence portion
gugccaagcucugcggguaggc

SEQ ID NO: 11564 - RNA, 22 nt, Artificial Sequence
  SAMD9L targeting guide sequence portion
gugccaugagaauagagagaga

SEQ ID NO: 11565 - RNA, 22 nt, Artificial Sequence
  SAMD9L targeting guide sequence portion
guggaagguaaauauauuguuc

SEQ ID NO: 11566 - RNA, 22 nt, Artificial Sequence
  SAMD9L targeting guide sequence portion
guggagucaaucuuuuaauguu

SEQ ID NO: 11567 - RNA, 22 nt, Artificial Sequence
  SAMD9L targeting guide sequence portion
guggauaucaaugaaacuucuu

SEQ ID NO: 11568 - RNA, 22 nt, Artificial Sequence
  SAMD9L targeting guide sequence portion
guggaucuguggguuugagucc

SEQ ID NO: 11569 - RNA, 22 nt, Artificial Sequence
  SAMD9L targeting guide sequence portion
guggauggggaacaauauauuu

SEQ ID NO: 11570 - RNA, 22 nt, Artificial Sequence
  SAMD9L targeting guide sequence portion
guggguuugaguccaauaagcu

SEQ ID NO: 11571 - RNA, 22 nt, Artificial Sequence
  SAMD9L targeting guide sequence portion
gugguggauggggaacaauaua

SEQ ID NO: 11572 - RNA, 22 nt, Artificial Sequence
  SAMD9L targeting guide sequence portion
guguggaucuguggguuugagu

SEQ ID NO: 11573 - RNA, 22 nt, Artificial Sequence
  SAMD9L targeting guide sequence portion
guguuaaacucaauugcuuuua

SEQ ID NO: 11574 - RNA, 22 nt, Artificial Sequence
  SAMD9L targeting guide sequence portion
guuaaacucaauugcuuuuaua

SEQ ID NO: 11575 - RNA, 22 nt, Artificial Sequence
  SAMD9L targeting guide sequence portion
guuagccauaauguuaugaaag

SEQ ID NO: 11576 - RNA, 22 nt, Artificial Sequence
  SAMD9L targeting guide sequence portion
guuaugaaagugccaugagaau

SEQ ID NO: 11577 - RNA, 22 nt, Artificial Sequence
  SAMD9L targeting guide sequence portion
guuaugaugugaccaguggaua

SEQ ID NO: 11578 - RNA, 22 nt, Artificial Sequence
  SAMD9L targeting guide sequence portion
guucaaauacguuuauuuauau

SEQ ID NO: 11579 - RNA, 22 nt, Artificial Sequence
  SAMD9L targeting guide sequence portion
guucuauuuaccucaucuuggu

SEQ ID NO: 11580 - RNA, 22 nt, Artificial Sequence
  SAMD9L targeting guide sequence portion
guuuaacacagauuuuauugcc

SEQ ID NO: 11581 - RNA, 22 nt, Artificial Sequence
  SAMD9L targeting guide sequence portion
guuuauuuauaucuuuaugauu

SEQ ID NO: 11582 - RNA, 22 nt, Artificial Sequence
  SAMD9L targeting guide sequence portion
guuucauugauauccacugguc

SEQ ID NO: 11583 - RNA, 22 nt, Artificial Sequence
  SAMD9L targeting guide sequence portion
guuugaguccaauaagcuuucu

SEQ ID NO: 11584 - RNA, 22 nt, Artificial Sequence
  SAMD9L targeting guide sequence portion
guuuuaaauaugcauuuucaga

SEQ ID NO: 11585 - RNA, 22 nt, Artificial Sequence
  SAMD9L targeting guide sequence portion
guuuucuaaauuauuucuucac

SEQ ID NO: 11586 - RNA, 22 nt, Artificial Sequence
  SAMD9L targeting guide sequence portion
guuuuuauugauaccaagauga

SEQ ID NO: 11587 - RNA, 22 nt, Artificial Sequence
  SAMD9L targeting guide sequence portion
uaaaaaggcuuguaauucauuc

SEQ ID NO: 11588 - RNA, 22 nt, Artificial Sequence
  SAMD9L targeting guide sequence portion
uaaaacauuaaaagauugacuc

SEQ ID NO: 11589 - RNA, 22 nt, Artificial Sequence
  SAMD9L targeting guide sequence portion
uaaaagagaaagcuuauuggac

SEQ ID NO: 11590 - RNA, 22 nt, Artificial Sequence
  SAMD9L targeting guide sequence portion
uaaaagauugacuccacuuugu

SEQ ID NO: 11591 - RNA, 22 nt, Artificial Sequence
  SAMD9L targeting guide sequence portion
uaaaagcaauugaguuuaacac

SEQ ID NO: 11592 - RNA, 22 nt, Artificial Sequence
  SAMD9L targeting guide sequence portion
uaaaaucauaaagauauaaaua

SEQ ID NO: 11593 - RNA, 22 nt, Artificial Sequence
  SAMD9L targeting guide sequence portion
uaaaaucuguguuaaacucaau

SEQ ID NO: 11594 - RNA, 22 nt, Artificial Sequence
  SAMD9L targeting guide sequence portion
uaaacucaauugcuuuuauaag

SEQ ID NO: 11595 - RNA, 22 nt, Artificial Sequence
  SAMD9L targeting guide sequence portion
uaaagauauaaauaaacguauu

SEQ ID NO: 11596 - RNA, 22 nt, Artificial Sequence
  SAMD9L targeting guide sequence portion
uaaauaagaugaauguaaaaga

SEQ ID NO: 11597 - RNA, 22 nt, Artificial Sequence
  SAMD9L targeting guide sequence portion
uaaauagaacucugguguggau

SEQ ID NO: 11598 - RNA, 22 nt, Artificial Sequence
  SAMD9L targeting guide sequence portion
uaaauauauuguuccccaucca

SEQ ID NO: 11599 - RNA, 22 nt, Artificial Sequence
  SAMD9L targeting guide sequence portion
uaaauaugcauuuucagacuca

SEQ ID NO: 11600 - RNA, 22 nt, Artificial Sequence
  SAMD9L targeting guide sequence portion
uaaaucuuugcugucacaguga

SEQ ID NO: 11601 - RNA, 22 nt, Artificial Sequence
  SAMD9L targeting guide sequence portion
uaaauuauuucuucacugugac

SEQ ID NO: 11602 - RNA, 22 nt, Artificial Sequence
  SAMD9L targeting guide sequence portion
uaacacagauuuuauugcccua

SEQ ID NO: 11603 - RNA, 22 nt, Artificial Sequence
  SAMD9L targeting guide sequence portion
uaacauuauggcuaaccucuaa

SEQ ID NO: 11604 - RNA, 22 nt, Artificial Sequence
  SAMD9L targeting guide sequence portion
uaaccucuaauuacagauuuug

SEQ ID NO: 11605 - RNA, 22 nt, Artificial Sequence
  SAMD9L targeting guide sequence portion
uaacugucuauagggcaauaaa

SEQ ID NO: 11606 - RNA, 22 nt, Artificial Sequence
  SAMD9L targeting guide sequence portion
uaagaaguuucauugauaucca

SEQ ID NO: 11607 - RNA, 22 nt, Artificial Sequence
  SAMD9L targeting guide sequence portion
uaagauaugaaauaugccuacc

SEQ ID NO: 11608 - RNA, 22 nt, Artificial Sequence
  SAMD9L targeting guide sequence portion
uaagaugaauguaaaagagaaa

SEQ ID NO: 11609 - RNA, 22 nt, Artificial Sequence
  SAMD9L targeting guide sequence portion
uaagcuuucucuuuuacauuca

SEQ ID NO: 11610 - RNA, 22 nt, Artificial Sequence
  SAMD9L targeting guide sequence portion
uaaguuuucuaaauuauuucuu

SEQ ID NO: 11611 - RNA, 22 nt, Artificial Sequence
  SAMD9L targeting guide sequence portion
uaauguuaugaaagugccauga

SEQ ID NO: 11612 - RNA, 22 nt, Artificial Sequence
  SAMD9L targeting guide sequence portion
uaauguuuuaaauaugcauuuu

SEQ ID NO: 11613 - RNA, 22 nt, Artificial Sequence
  SAMD9L targeting guide sequence portion
uaauuaagaaguuucauugaua

SEQ ID NO: 11614 - RNA, 22 nt, Artificial Sequence
  SAMD9L targeting guide sequence portion
uaauuacagauuuugcuuuugc

SEQ ID NO: 11615 - RNA, 22 nt, Artificial Sequence
  SAMD9L targeting guide sequence portion
uaauuagagguuagccauaaug

SEQ ID NO: 11616 - RNA, 22 nt, Artificial Sequence
  SAMD9L targeting guide sequence portion
uaauuauuugagucugaaaaug

SEQ ID NO: 11617 - RNA, 22 nt, Artificial Sequence
  SAMD9L targeting guide sequence portion
uaauucauucagggaggcaaaa

SEQ ID NO: 11618 - RNA, 22 nt, Artificial Sequence
  SAMD9L targeting guide sequence portion
uaauuuagaaaacuuauaaaag

SEQ ID NO: 11619 - RNA, 22 nt, Artificial Sequence
  SAMD9L targeting guide sequence portion
uacaagccuuuuuaagauauga

SEQ ID NO: 11620 - RNA, 22 nt, Artificial Sequence
  SAMD9L targeting guide sequence portion
uacagauuuugcuuuugccucc

SEQ ID NO: 11621 - RNA, 22 nt, Artificial Sequence
  SAMD9L targeting guide sequence portion
uacauucaucuuauuuaaaucu

SEQ ID NO: 11622 - RNA, 22 nt, Artificial Sequence
  SAMD9L targeting guide sequence portion
uaccaagaugagguaaauagaa

SEQ ID NO: 11623 - RNA, 22 nt, Artificial Sequence
  SAMD9L targeting guide sequence portion
uacccgcagagcuuggcacaaa

SEQ ID NO: 11624 - RNA, 22 nt, Artificial Sequence
  SAMD9L targeting guide sequence portion
uacguuuauuuauaucuuuaug

SEQ ID NO: 11625 - RNA, 22 nt, Artificial Sequence
  SAMD9L targeting guide sequence portion
uagaaaacuuauaaaagcaauu

SEQ ID NO: 11626 - RNA, 22 nt, Artificial Sequence
  SAMD9L targeting guide sequence portion
uagaacucugguguggaucugu

SEQ ID NO: 11627 - RNA, 22 nt, Artificial Sequence
  SAMD9L targeting guide sequence portion
uagacaguuaugaugugaccag

SEQ ID NO: 11628 - RNA, 22 nt, Artificial Sequence
  SAMD9L targeting guide sequence portion
uagagagagagaauaaaaucau

SEQ ID NO: 11629 - RNA, 22 nt, Artificial Sequence
  SAMD9L targeting guide sequence portion
uagagguuagccauaauguuau

SEQ ID NO: 11630 - RNA, 22 nt, Artificial Sequence
  SAMD9L targeting guide sequence portion
uagccauaauguuaugaaagug

SEQ ID NO: 11631 - RNA, 22 nt, Artificial Sequence
  SAMD9L targeting guide sequence portion
uaggcauauuucauaucuuaaa

SEQ ID NO: 11632 - RNA, 22 nt, Artificial Sequence
  SAMD9L targeting guide sequence portion
uagggcaauaaaaucuguguua

SEQ ID NO: 11633 - RNA, 22 nt, Artificial Sequence
  SAMD9L targeting guide sequence portion
uaguucaaauacguuuauuuau

SEQ ID NO: 11634 - RNA, 22 nt, Artificial Sequence
  SAMD9L targeting guide sequence portion
uauaaaagcaauugaguuuaac

SEQ ID NO: 11635 - RNA, 22 nt, Artificial Sequence
  SAMD9L targeting guide sequence portion
uauaaauaaacguauuugaacu

SEQ ID NO: 11636 - RNA, 22 nt, Artificial Sequence
  SAMD9L targeting guide sequence portion
uauaaguuuucuaaauuauuuc

SEQ ID NO: 11637 - RNA, 22 nt, Artificial Sequence
  SAMD9L targeting guide sequence portion
uauagacaguuaugaugugacc

SEQ ID NO: 11638 - RNA, 22 nt, Artificial Sequence
  SAMD9L targeting guide sequence portion
uauagggcaauaaaaucugugu

SEQ ID NO: 11639 - RNA, 22 nt, Artificial Sequence
  SAMD9L targeting guide sequence portion
uauaucuuuaugauuuuauucu

SEQ ID NO: 11640 - RNA, 22 nt, Artificial Sequence
  SAMD9L targeting guide sequence portion
uaucaaugaaacuucuuaauua

SEQ ID NO: 11641 - RNA, 22 nt, Artificial Sequence
  SAMD9L targeting guide sequence portion
uauccacuggucacaucauaac

SEQ ID NO: 11642 - RNA, 22 nt, Artificial Sequence
  SAMD9L targeting guide sequence portion
uaucuuaaaaaggcuuguaauu

SEQ ID NO: 11643 - RNA, 22 nt, Artificial Sequence
  SAMD9L targeting guide sequence portion
uaucuuuaugauuuuauucucu

SEQ ID NO: 11644 - RNA, 22 nt, Artificial Sequence
  SAMD9L targeting guide sequence portion
uaugaaagugccaugagaauag

SEQ ID NO: 11645 - RNA, 22 nt, Artificial Sequence
  SAMD9L targeting guide sequence portion
uaugaaauaugccuacccgcag

SEQ ID NO: 11646 - RNA, 22 nt, Artificial Sequence
  SAMD9L targeting guide sequence portion
uaugaugugaccaguggauauc

SEQ ID NO: 11647 - RNA, 22 nt, Artificial Sequence
  SAMD9L targeting guide sequence portion
uaugauuuuauucucucucucu

SEQ ID NO: 11648 - RNA, 22 nt, Artificial Sequence
  SAMD9L targeting guide sequence portion
uaugcauuuucagacucaaaua

SEQ ID NO: 11649 - RNA, 22 nt, Artificial Sequence
  SAMD9L targeting guide sequence portion
uaugccuacccgcagagcuugg

SEQ ID NO: 11650 - RNA, 22 nt, Artificial Sequence
  SAMD9L targeting guide sequence portion
uauggcuaaccucuaauuacag

SEQ ID NO: 11651 - RNA, 22 nt, Artificial Sequence
  SAMD9L targeting guide sequence portion
uaugugguggauggggaacaau

SEQ ID NO: 11652 - RNA, 22 nt, Artificial Sequence
  SAMD9L targeting guide sequence portion
uauucucauggcacuuucauaa

SEQ ID NO: 11653 - RNA, 22 nt, Artificial Sequence
  SAMD9L targeting guide sequence portion
uauucucucucucuauucucau

SEQ ID NO: 11654 - RNA, 22 nt, Artificial Sequence
  SAMD9L targeting guide sequence portion
uauugauaccaagaugagguaa

SEQ ID NO: 11655 - RNA, 22 nt, Artificial Sequence
  SAMD9L targeting guide sequence portion
uauugcccuauagacaguuaug

SEQ ID NO: 11656 - RNA, 22 nt, Artificial Sequence
  SAMD9L targeting guide sequence portion
uauuggacucaaacccacagau

SEQ ID NO: 11657 - RNA, 22 nt, Artificial Sequence
  SAMD9L targeting guide sequence portion
uauuuaaaacauuaaaagauug

SEQ ID NO: 11658 - RNA, 22 nt, Artificial Sequence
  SAMD9L targeting guide sequence portion
uauuuaaaucuuugcugucaca

SEQ ID NO: 11659 - RNA, 22 nt, Artificial Sequence
  SAMD9L targeting guide sequence portion
uauuuaccucaucuugguauca

SEQ ID NO: 11660 - RNA, 22 nt, Artificial Sequence
  SAMD9L targeting guide sequence portion
uauuuauaucuuuaugauuuua

SEQ ID NO: 11661 - RNA, 22 nt, Artificial Sequence
  SAMD9L targeting guide sequence portion
uauuucauaucuuaaaaaggcu

SEQ ID NO: 11662 - RNA, 22 nt, Artificial Sequence
  SAMD9L targeting guide sequence portion
uauuucuucacugugacagcaa

SEQ ID NO: 11663 - RNA, 22 nt, Artificial Sequence
  SAMD9L targeting guide sequence portion
uauuugagucugaaaaugcaua

SEQ ID NO: 11664 - RNA, 22 nt, Artificial Sequence
  SAMD9L targeting guide sequence portion
ucaaacccacagauccacacca

SEQ ID NO: 11665 - RNA, 22 nt, Artificial Sequence
  SAMD9L targeting guide sequence portion
ucaaauaauuaagaaguuucau

SEQ ID NO: 11666 - RNA, 22 nt, Artificial Sequence
  SAMD9L targeting guide sequence portion
ucaaauacguuuauuuauaucu

SEQ ID NO: 11667 - RNA, 22 nt, Artificial Sequence
  SAMD9L targeting guide sequence portion
ucaaucuuuuaauguuuuaaau

SEQ ID NO: 11668 - RNA, 22 nt, Artificial Sequence
  SAMD9L targeting guide sequence portion
ucaaugaaacuucuuaauuauu

SEQ ID NO: 11669 - RNA, 22 nt, Artificial Sequence
  SAMD9L targeting guide sequence portion
ucaauugcuuuuauaaguuuuc

SEQ ID NO: 11670 - RNA, 22 nt, Artificial Sequence
  SAMD9L targeting guide sequence portion
ucacagugaagaaauaauuuag

SEQ ID NO: 11671 - RNA, 22 nt, Artificial Sequence
  SAMD9L targeting guide sequence portion
ucacaucauaacugucuauagg

SEQ ID NO: 11672 - RNA, 22 nt, Artificial Sequence
  SAMD9L targeting guide sequence portion
ucacugugacagcaaagauuua

SEQ ID NO: 11673 - RNA, 22 nt, Artificial Sequence
  SAMD9L targeting guide sequence portion
ucagacucaaauaauuaagaag

SEQ ID NO: 11674 - RNA, 22 nt, Artificial Sequence
  SAMD9L targeting guide sequence portion
ucagggaggcaaaagcaaaauc

SEQ ID NO: 11675 - RNA, 22 nt, Artificial Sequence
  SAMD9L targeting guide sequence portion
ucauaaagauauaaauaaacgu

SEQ ID NO: 11676 - RNA, 22 nt, Artificial Sequence
  SAMD9L targeting guide sequence portion
ucauaacauuauggcuaaccuc

SEQ ID NO: 11677 - RNA, 22 nt, Artificial Sequence
  SAMD9L targeting guide sequence portion
ucauaacugucuauagggcaau

SEQ ID NO: 11678 - RNA, 22 nt, Artificial Sequence
  SAMD9L targeting guide sequence portion
ucauaucuuaaaaaggcuugua

SEQ ID NO: 11679 - RNA, 22 nt, Artificial Sequence
  SAMD9L targeting guide sequence portion
ucaucuuauuuaaaucuuugcu

SEQ ID NO: 11680 - RNA, 22 nt, Artificial Sequence
  SAMD9L targeting guide sequence portion
ucauggcacuuucauaacauua

SEQ ID NO: 11681 - RNA, 22 nt, Artificial Sequence
  SAMD9L targeting guide sequence portion
ucauucagggaggcaaaagcaa

SEQ ID NO: 11682 - RNA, 22 nt, Artificial Sequence
  SAMD9L targeting guide sequence portion
ucauugauauccacuggucaca

SEQ ID NO: 11683 - RNA, 22 nt, Artificial Sequence
  SAMD9L targeting guide sequence portion
uccaauaagcuuucucuuuuac

SEQ ID NO: 11684 - RNA, 22 nt, Artificial Sequence
  SAMD9L targeting guide sequence portion
uccacaccagaguucuauuuac

SEQ ID NO: 11685 - RNA, 22 nt, Artificial Sequence
  SAMD9L targeting guide sequence portion
uccacuggucacaucauaacug

SEQ ID NO: 11686 - RNA, 22 nt, Artificial Sequence
  SAMD9L targeting guide sequence portion
uccacuuugugccaagcucugc

SEQ ID NO: 11687 - RNA, 22 nt, Artificial Sequence
  SAMD9L targeting guide sequence portion
ucccugaaugaauuacaagccu

SEQ ID NO: 11688 - RNA, 22 nt, Artificial Sequence
  SAMD9L targeting guide sequence portion
ucuaaauuauuucuucacugug

SEQ ID NO: 11689 - RNA, 22 nt, Artificial Sequence
  SAMD9L targeting guide sequence portion
ucuaauuacagauuuugcuuuu

SEQ ID NO: 11690 - RNA, 22 nt, Artificial Sequence
  SAMD9L targeting guide sequence portion
ucuauagggcaauaaaaucugu

SEQ ID NO: 11691 - RNA, 22 nt, Artificial Sequence
  SAMD9L targeting guide sequence portion
ucuauucucauggcacuuucau

SEQ ID NO: 11692 - RNA, 22 nt, Artificial Sequence
  SAMD9L targeting guide sequence portion
ucuauuuaccucaucuugguau

SEQ ID NO: 11693 - RNA, 22 nt, Artificial Sequence
  SAMD9L targeting guide sequence portion
ucucauggcacuuucauaacau

SEQ ID NO: 11694 - RNA, 22 nt, Artificial Sequence
  SAMD9L targeting guide sequence portion
ucucuauucucauggcacuuuc

SEQ ID NO: 11695 - RNA, 22 nt, Artificial Sequence
  SAMD9L targeting guide sequence portion
ucucucuauucucauggcacuu

SEQ ID NO: 11696 - RNA, 22 nt, Artificial Sequence
  SAMD9L targeting guide sequence portion
ucucucucuauucucauggcac

SEQ ID NO: 11697 - RNA, 22 nt, Artificial Sequence
  SAMD9L targeting guide sequence portion
ucucucucucuauucucauggc

SEQ ID NO: 11698 - RNA, 22 nt, Artificial Sequence
  SAMD9L targeting guide sequence portion
ucucuuuuacauucaucuuauu

SEQ ID NO: 11699 - RNA, 22 nt, Artificial Sequence
  SAMD9L targeting guide sequence portion
ucugaaaaugcauauuuaaaac

SEQ ID NO: 11700 - RNA, 22 nt, Artificial Sequence
  SAMD9L targeting guide sequence portion
ucugcggguaggcauauuucau

SEQ ID NO: 11701 - RNA, 22 nt, Artificial Sequence
  SAMD9L targeting guide sequence portion
ucugguguggaucuguggguuu

SEQ ID NO: 11702 - RNA, 22 nt, Artificial Sequence
  SAMD9L targeting guide sequence portion
ucuguaauuagagguuagccau

SEQ ID NO: 11703 - RNA, 22 nt, Artificial Sequence
  SAMD9L targeting guide sequence portion
ucuguggguuugaguccaauaa

SEQ ID NO: 11704 - RNA, 22 nt, Artificial Sequence
  SAMD9L targeting guide sequence portion
ucuguguuaaacucaauugcuu

SEQ ID NO: 11705 - RNA, 22 nt, Artificial Sequence
  SAMD9L targeting guide sequence portion
ucuuaaaaaggcuuguaauuca

SEQ ID NO: 11706 - RNA, 22 nt, Artificial Sequence
  SAMD9L targeting guide sequence portion
ucuuaauuauuugagucugaaa

SEQ ID NO: 11707 - RNA, 22 nt, Artificial Sequence
  SAMD9L targeting guide sequence portion
ucuuauuuaaaucuuugcuguc

SEQ ID NO: 11708 - RNA, 22 nt, Artificial Sequence
  SAMD9L targeting guide sequence portion
ucuucacugugacagcaaagau

SEQ ID NO: 11709 - RNA, 22 nt, Artificial Sequence
  SAMD9L targeting guide sequence portion
ucuuuaugauuuuauucucucu

SEQ ID NO: 11710 - RNA, 22 nt, Artificial Sequence
  SAMD9L targeting guide sequence portion
ucuuugcugucacagugaagaa

SEQ ID NO: 11711 - RNA, 22 nt, Artificial Sequence
  SAMD9L targeting guide sequence portion
ucuuuuaauguuuuaaauaugc

SEQ ID NO: 11712 - RNA, 22 nt, Artificial Sequence
  SAMD9L targeting guide sequence portion
ucuuuuacauucaucuuauuua

SEQ ID NO: 11713 - RNA, 22 nt, Artificial Sequence
  SAMD9L targeting guide sequence portion
ugaaaaugcauauuuaaaacau

SEQ ID NO: 11714 - RNA, 22 nt, Artificial Sequence
  SAMD9L targeting guide sequence portion
ugaaacuucuuaauuauuugag

SEQ ID NO: 11715 - RNA, 22 nt, Artificial Sequence
  SAMD9L targeting guide sequence portion
ugaaagugccaugagaauagag

SEQ ID NO: 11716 - RNA, 22 nt, Artificial Sequence
  SAMD9L targeting guide sequence portion
ugaaauaugccuacccgcagag

SEQ ID NO: 11717 - RNA, 22 nt, Artificial Sequence
  SAMD9L targeting guide sequence portion
ugaagaaauaauuuagaaaacu

SEQ ID NO: 11718 - RNA, 22 nt, Artificial Sequence
  SAMD9L targeting guide sequence portion
ugaaugaauuacaagccuuuuu

SEQ ID NO: 11719 - RNA, 22 nt, Artificial Sequence
  SAMD9L targeting guide sequence portion
ugaauguaaaagagaaagcuua

SEQ ID NO: 11720 - RNA, 22 nt, Artificial Sequence
  SAMD9L targeting guide sequence portion
ugaauuacaagccuuuuuaaga

SEQ ID NO: 11721 - RNA, 22 nt, Artificial Sequence
  SAMD9L targeting guide sequence portion
ugacagcaaagauuuaaauaag

SEQ ID NO: 11722 - RNA, 22 nt, Artificial Sequence
  SAMD9L targeting guide sequence portion
ugaccaguggauaucaaugaaa

SEQ ID NO: 11723 - RNA, 22 nt, Artificial Sequence
  SAMD9L targeting guide sequence portion
ugacuccacuuugugccaagcu

SEQ ID NO: 11724 - RNA, 22 nt, Artificial Sequence
  SAMD9L targeting guide sequence portion
ugagaauagagagagagaauaa

SEQ ID NO: 11725 - RNA, 22 nt, Artificial Sequence
  SAMD9L targeting guide sequence portion
ugagguaaauagaacucuggug

SEQ ID NO: 11726 - RNA, 22 nt, Artificial Sequence
  SAMD9L targeting guide sequence portion
ugaguccaauaagcuuucucuu

SEQ ID NO: 11727 - RNA, 22 nt, Artificial Sequence
  SAMD9L targeting guide sequence portion
ugagucugaaaaugcauauuua

SEQ ID NO: 11728 - RNA, 22 nt, Artificial Sequence
  SAMD9L targeting guide sequence portion
ugaguuuaacacagauuuuauu

SEQ ID NO: 11729 - RNA, 22 nt, Artificial Sequence
  SAMD9L targeting guide sequence portion
ugauaccaagaugagguaaaua

SEQ ID NO: 11730 - RNA, 22 nt, Artificial Sequence
  SAMD9L targeting guide sequence portion
ugauauccacuggucacaucau

SEQ ID NO: 11731 - RNA, 22 nt, Artificial Sequence
  SAMD9L targeting guide sequence portion
ugaugugaccaguggauaucaa

SEQ ID NO: 11732 - RNA, 22 nt, Artificial Sequence
  SAMD9L targeting guide sequence portion
ugauuuuauucucucucucuau

SEQ ID NO: 11733 - RNA, 22 nt, Artificial Sequence
  SAMD9L targeting guide sequence portion
ugcauauuuaaaacauuaaaag

SEQ ID NO: 11734 - RNA, 22 nt, Artificial Sequence
  SAMD9L targeting guide sequence portion
ugcauuuucagacucaaauaau

SEQ ID NO: 11735 - RNA, 22 nt, Artificial Sequence
  SAMD9L targeting guide sequence portion
ugccaagcucugcggguaggca

SEQ ID NO: 11736 - RNA, 22 nt, Artificial Sequence
  SAMD9L targeting guide sequence portion
ugccaugagaauagagagagag

SEQ ID NO: 11737 - RNA, 22 nt, Artificial Sequence
  SAMD9L targeting guide sequence portion
ugcccuauagacaguuaugaug

SEQ ID NO: 11738 - RNA, 22 nt, Artificial Sequence
  SAMD9L targeting guide sequence portion
ugccuacccgcagagcuuggca

SEQ ID NO: 11739 - RNA, 22 nt, Artificial Sequence
  SAMD9L targeting guide sequence portion
ugccucccugaaugaauuacaa

SEQ ID NO: 11740 - RNA, 22 nt, Artificial Sequence
  SAMD9L targeting guide sequence portion
ugcggguaggcauauuucauau

SEQ ID NO: 11741 - RNA, 22 nt, Artificial Sequence
  SAMD9L targeting guide sequence portion
ugcugucacagugaagaaauaa

SEQ ID NO: 11742 - RNA, 22 nt, Artificial Sequence
  SAMD9L targeting guide sequence portion
ugcuuuuauaaguuuucuaaau

SEQ ID NO: 11743 - RNA, 22 nt, Artificial Sequence
  SAMD9L targeting guide sequence portion
ugcuuuugccucccugaaugaa

SEQ ID NO: 11744 - RNA, 22 nt, Artificial Sequence
  SAMD9L targeting guide sequence portion
uggaagguaaauauauuguucc

SEQ ID NO: 11745 - RNA, 22 nt, Artificial Sequence
  SAMD9L targeting guide sequence portion
uggacucaaacccacagaucca

SEQ ID NO: 11746 - RNA, 22 nt, Artificial Sequence
  SAMD9L targeting guide sequence portion
uggagucaaucuuuuaauguuu

SEQ ID NO: 11747 - RNA, 22 nt, Artificial Sequence
  SAMD9L targeting guide sequence portion
uggauaucaaugaaacuucuua

SEQ ID NO: 11748 - RNA, 22 nt, Artificial Sequence
  SAMD9L targeting guide sequence portion
uggaucuguggguuugagucca

SEQ ID NO: 11749 - RNA, 22 nt, Artificial Sequence
  SAMD9L targeting guide sequence portion
uggauggggaacaauauauuua

SEQ ID NO: 11750 - RNA, 22 nt, Artificial Sequence
  SAMD9L targeting guide sequence portion
uggcacaaaguggagucaaucu

SEQ ID NO: 11751 - RNA, 22 nt, Artificial Sequence
  SAMD9L targeting guide sequence portion
uggcacuuucauaacauuaugg

SEQ ID NO: 11752 - RNA, 22 nt, Artificial Sequence
  SAMD9L targeting guide sequence portion
uggcuaaccucuaauuacagau

SEQ ID NO: 11753 - RNA, 22 nt, Artificial Sequence
  SAMD9L targeting guide sequence portion
uggggaacaauauauuuaccuu

SEQ ID NO: 11754 - RNA, 22 nt, Artificial Sequence
  SAMD9L targeting guide sequence portion
uggguuugaguccaauaagcuu

SEQ ID NO: 11755 - RNA, 22 nt, Artificial Sequence
  SAMD9L targeting guide sequence portion
uggucacaucauaacugucuau

SEQ ID NO: 11756 - RNA, 22 nt, Artificial Sequence
  SAMD9L targeting guide sequence portion
ugguggauggggaacaauauau

SEQ ID NO: 11757 - RNA, 22 nt, Artificial Sequence
  SAMD9L targeting guide sequence portion
ugguguggaucuguggguuuga

SEQ ID NO: 11758 - RNA, 22 nt, Artificial Sequence
  SAMD9L targeting guide sequence portion
uguaaaagagaaagcuuauugg

SEQ ID NO: 11759 - RNA, 22 nt, Artificial Sequence
  SAMD9L targeting guide sequence portion
uguaauuagagguuagccauaa

SEQ ID NO: 11760 - RNA, 22 nt, Artificial Sequence
  SAMD9L targeting guide sequence portion
uguaauucauucagggaggcaa

SEQ ID NO: 11761 - RNA, 22 nt, Artificial Sequence
  SAMD9L targeting guide sequence portion
ugucacagugaagaaauaauuu

SEQ ID NO: 11762 - RNA, 22 nt, Artificial Sequence
  SAMD9L targeting guide sequence portion
ugucuauagggcaauaaaaucu

SEQ ID NO: 11763 - RNA, 22 nt, Artificial Sequence
  SAMD9L targeting guide sequence portion
ugugacagcaaagauuuaaaua

SEQ ID NO: 11764 - RNA, 22 nt, Artificial Sequence
  SAMD9L targeting guide sequence portion
ugugaccaguggauaucaauga

SEQ ID NO: 11765 - RNA, 22 nt, Artificial Sequence
  SAMD9L targeting guide sequence portion
ugugccaagcucugcggguagg

SEQ ID NO: 11766 - RNA, 22 nt, Artificial Sequence
  SAMD9L targeting guide sequence portion
uguggaagguaaauauauuguu

SEQ ID NO: 11767 - RNA, 22 nt, Artificial Sequence
  SAMD9L targeting guide sequence portion
uguggaucuguggguuugaguc

SEQ ID NO: 11768 - RNA, 22 nt, Artificial Sequence
  SAMD9L targeting guide sequence portion
uguggguuugaguccaauaagc

SEQ ID NO: 11769 - RNA, 22 nt, Artificial Sequence
  SAMD9L targeting guide sequence portion
ugugguggauggggaacaauau

SEQ ID NO: 11770 - RNA, 22 nt, Artificial Sequence
  SAMD9L targeting guide sequence portion
uguguuaaacucaauugcuuuu

SEQ ID NO: 11771 - RNA, 22 nt, Artificial Sequence
  SAMD9L targeting guide sequence portion
uguuaaacucaauugcuuuuau

SEQ ID NO: 11772 - RNA, 22 nt, Artificial Sequence
  SAMD9L targeting guide sequence portion
uguuaugaaagugccaugagaa

SEQ ID NO: 11773 - RNA, 22 nt, Artificial Sequence
  SAMD9L targeting guide sequence portion
uguuuuaaauaugcauuuucag

SEQ ID NO: 11774 - RNA, 22 nt, Artificial Sequence
  SAMD9L targeting guide sequence portion
uuaaaaaggcuuguaauucauu

SEQ ID NO: 11775 - RNA, 22 nt, Artificial Sequence
  SAMD9L targeting guide sequence portion
uuaaaacauuaaaagauugacu

SEQ ID NO: 11776 - RNA, 22 nt, Artificial Sequence
  SAMD9L targeting guide sequence portion
uuaaaagauugacuccacuuug

SEQ ID NO: 11777 - RNA, 22 nt, Artificial Sequence
  SAMD9L targeting guide sequence portion
uuaaacucaauugcuuuuauaa

SEQ ID NO: 11778 - RNA, 22 nt, Artificial Sequence
  SAMD9L targeting guide sequence portion
uuaaauaagaugaauguaaaag

SEQ ID NO: 11779 - RNA, 22 nt, Artificial Sequence
  SAMD9L targeting guide sequence portion
uuaaauaugcauuuucagacuc

SEQ ID NO: 11780 - RNA, 22 nt, Artificial Sequence
  SAMD9L targeting guide sequence portion
uuaaaucuuugcugucacagug

SEQ ID NO: 11781 - RNA, 22 nt, Artificial Sequence
  SAMD9L targeting guide sequence portion
uuaacacagauuuuauugcccu

SEQ ID NO: 11782 - RNA, 22 nt, Artificial Sequence
  SAMD9L targeting guide sequence portion
uuaagaaguuucauugauaucc

SEQ ID NO: 11783 - RNA, 22 nt, Artificial Sequence
  SAMD9L targeting guide sequence portion
uuaagauaugaaauaugccuac

SEQ ID NO: 11784 - RNA, 22 nt, Artificial Sequence
  SAMD9L targeting guide sequence portion
uuaauguuuuaaauaugcauuu

SEQ ID NO: 11785 - RNA, 22 nt, Artificial Sequence
  SAMD9L targeting guide sequence portion
uuaauuauuugagucugaaaau

SEQ ID NO: 11786 - RNA, 22 nt, Artificial Sequence
  SAMD9L targeting guide sequence portion
uuacaagccuuuuuaagauaug

SEQ ID NO: 11787 - RNA, 22 nt, Artificial Sequence
  SAMD9L targeting guide sequence portion
uuacagauuuugcuuuugccuc

SEQ ID NO: 11788 - RNA, 22 nt, Artificial Sequence
  SAMD9L targeting guide sequence portion
uuacauucaucuuauuuaaauc

SEQ ID NO: 11789 - RNA, 22 nt, Artificial Sequence
  SAMD9L targeting guide sequence portion
uuaccucaucuugguaucaaua

SEQ ID NO: 11790 - RNA, 22 nt, Artificial Sequence
  SAMD9L targeting guide sequence portion
uuagaaaacuuauaaaagcaau

SEQ ID NO: 11791 - RNA, 22 nt, Artificial Sequence
  SAMD9L targeting guide sequence portion
uuagagguuagccauaauguua

SEQ ID NO: 11792 - RNA, 22 nt, Artificial Sequence
  SAMD9L targeting guide sequence portion
uuagccauaauguuaugaaagu

SEQ ID NO: 11793 - RNA, 22 nt, Artificial Sequence
  SAMD9L targeting guide sequence portion
uuauaaaagcaauugaguuuaa

SEQ ID NO: 11794 - RNA, 22 nt, Artificial Sequence
  SAMD9L targeting guide sequence portion
uuauaaguuuucuaaauuauuu

SEQ ID NO: 11795 - RNA, 22 nt, Artificial Sequence
  SAMD9L targeting guide sequence portion
uuauaucuuuaugauuuuauuc

SEQ ID NO: 11796 - RNA, 22 nt, Artificial Sequence
  SAMD9L targeting guide sequence portion
uuaugaaagugccaugagaaua

SEQ ID NO: 11797 - RNA, 22 nt, Artificial Sequence
  SAMD9L targeting guide sequence portion
uuaugaugugaccaguggauau

SEQ ID NO: 11798 - RNA, 22 nt, Artificial Sequence
  SAMD9L targeting guide sequence portion
uuaugauuuuauucucucucuc

SEQ ID NO: 11799 - RNA, 22 nt, Artificial Sequence
  SAMD9L targeting guide sequence portion
uuauggcuaaccucuaauuaca

SEQ ID NO: 11800 - RNA, 22 nt, Artificial Sequence
  SAMD9L targeting guide sequence portion
uuauucucucucucuauucuca

SEQ ID NO: 11801 - RNA, 22 nt, Artificial Sequence
  SAMD9L targeting guide sequence portion
uuauugauaccaagaugaggua

SEQ ID NO: 11802 - RNA, 22 nt, Artificial Sequence
  SAMD9L targeting guide sequence portion
uuauugcccuauagacaguuau

SEQ ID NO: 11803 - RNA, 22 nt, Artificial Sequence
  SAMD9L targeting guide sequence portion
uuauuggacucaaacccacaga

SEQ ID NO: 11804 - RNA, 22 nt, Artificial Sequence
  SAMD9L targeting guide sequence portion
uuauuuaaaucuuugcugucac

SEQ ID NO: 11805 - RNA, 22 nt, Artificial Sequence
  SAMD9L targeting guide sequence portion
uuauuuauaucuuuaugauuuu

SEQ ID NO: 11806 - RNA, 22 nt, Artificial Sequence
  SAMD9L targeting guide sequence portion
uuauuucuucacugugacagca

SEQ ID NO: 11807 - RNA, 22 nt, Artificial Sequence
  SAMD9L targeting guide sequence portion
uuauuugagucugaaaaugcau

SEQ ID NO: 11808 - RNA, 22 nt, Artificial Sequence
  SAMD9L targeting guide sequence portion
uucaaauacguuuauuuauauc

SEQ ID NO: 11809 - RNA, 22 nt, Artificial Sequence
  SAMD9L targeting guide sequence portion
uucacugugacagcaaagauuu

SEQ ID NO: 11810 - RNA, 22 nt, Artificial Sequence
  SAMD9L targeting guide sequence portion
uucagacucaaauaauuaagaa

SEQ ID NO: 11811 - RNA, 22 nt, Artificial Sequence
  SAMD9L targeting guide sequence portion
uucagggaggcaaaagcaaaau

SEQ ID NO: 11812 - RNA, 22 nt, Artificial Sequence
  SAMD9L targeting guide sequence portion
uucauaacauuauggcuaaccu

SEQ ID NO: 11813 - RNA, 22 nt, Artificial Sequence
  SAMD9L targeting guide sequence portion
uucauaucuuaaaaaggcuugu

SEQ ID NO: 11814 - RNA, 22 nt, Artificial Sequence
  SAMD9L targeting guide sequence portion
uucaucuuauuuaaaucuuugc

SEQ ID NO: 11815 - RNA, 22 nt, Artificial Sequence
  SAMD9L targeting guide sequence portion
uucauucagggaggcaaaagca

SEQ ID NO: 11816 - RNA, 22 nt, Artificial Sequence
  SAMD9L targeting guide sequence portion
uucauugauauccacuggucac

SEQ ID NO: 11817 - RNA, 22 nt, Artificial Sequence
  SAMD9L targeting guide sequence portion
uucuaaauuauuucuucacugu

SEQ ID NO: 11818 - RNA, 22 nt, Artificial Sequence
  SAMD9L targeting guide sequence portion
uucuauuuaccucaucuuggua

SEQ ID NO: 11819 - RNA, 22 nt, Artificial Sequence
  SAMD9L targeting guide sequence portion
uucucauggcacuuucauaaca

SEQ ID NO: 11820 - RNA, 22 nt, Artificial Sequence
  SAMD9L targeting guide sequence portion
uucucucucucuauucucaugg

SEQ ID NO: 11821 - RNA, 22 nt, Artificial Sequence
  SAMD9L targeting guide sequence portion
uucucuuuuacauucaucuuau

SEQ ID NO: 11822 - RNA, 22 nt, Artificial Sequence
  SAMD9L targeting guide sequence portion
uucuuaauuauuugagucugaa

SEQ ID NO: 11823 - RNA, 22 nt, Artificial Sequence
  SAMD9L targeting guide sequence portion
uucuucacugugacagcaaaga

SEQ ID NO: 11824 - RNA, 22 nt, Artificial Sequence
  SAMD9L targeting guide sequence portion
uugacuccacuuugugccaagc

SEQ ID NO: 11825 - RNA, 22 nt, Artificial Sequence
  SAMD9L targeting guide sequence portion
uugaguccaauaagcuuucucu

SEQ ID NO: 11826 - RNA, 22 nt, Artificial Sequence
  SAMD9L targeting guide sequence portion
uugagucugaaaaugcauauuu

SEQ ID NO: 11827 - RNA, 22 nt, Artificial Sequence
  SAMD9L targeting guide sequence portion
uugaguuuaacacagauuuuau

SEQ ID NO: 11828 - RNA, 22 nt, Artificial Sequence
  SAMD9L targeting guide sequence portion
uugauaccaagaugagguaaau

SEQ ID NO: 11829 - RNA, 22 nt, Artificial Sequence
  SAMD9L targeting guide sequence portion
uugauauccacuggucacauca

SEQ ID NO: 11830 - RNA, 22 nt, Artificial Sequence
  SAMD9L targeting guide sequence portion
uugcccuauagacaguuaugau

SEQ ID NO: 11831 - RNA, 22 nt, Artificial Sequence
  SAMD9L targeting guide sequence portion
uugccucccugaaugaauuaca

SEQ ID NO: 11832 - RNA, 22 nt, Artificial Sequence
  SAMD9L targeting guide sequence portion
uugcugucacagugaagaaaua

SEQ ID NO: 11833 - RNA, 22 nt, Artificial Sequence
  SAMD9L targeting guide sequence portion
uugcuuuuauaaguuuucuaaa

SEQ ID NO: 11834 - RNA, 22 nt, Artificial Sequence
  SAMD9L targeting guide sequence portion
uugcuuuugccucccugaauga

SEQ ID NO: 11835 - RNA, 22 nt, Artificial Sequence
  SAMD9L targeting guide sequence portion
uuggacucaaacccacagaucc

SEQ ID NO: 11836 - RNA, 22 nt, Artificial Sequence
  SAMD9L targeting guide sequence portion
uuggcacaaaguggagucaauc

SEQ ID NO: 11837 - RNA, 22 nt, Artificial Sequence
  SAMD9L targeting guide sequence portion
uuguaauucauucagggaggca

SEQ ID NO: 11838 - RNA, 22 nt, Artificial Sequence
  SAMD9L targeting guide sequence portion
uugugccaagcucugcggguag

SEQ ID NO: 11839 - RNA, 22 nt, Artificial Sequence
  SAMD9L targeting guide sequence portion
uuuaaaacauuaaaagauugac

SEQ ID NO: 11840 - RNA, 22 nt, Artificial Sequence
  SAMD9L targeting guide sequence portion
uuuaaauaagaugaauguaaaa

SEQ ID NO: 11841 - RNA, 22 nt, Artificial Sequence
  SAMD9L targeting guide sequence portion
uuuaaauaugcauuuucagacu

SEQ ID NO: 11842 - RNA, 22 nt, Artificial Sequence
  SAMD9L targeting guide sequence portion
uuuaaaucuuugcugucacagu

SEQ ID NO: 11843 - RNA, 22 nt, Artificial Sequence
  SAMD9L targeting guide sequence portion
uuuaacacagauuuuauugccc

SEQ ID NO: 11844 - RNA, 22 nt, Artificial Sequence
  SAMD9L targeting guide sequence portion
uuuaagauaugaaauaugccua

SEQ ID NO: 11845 - RNA, 22 nt, Artificial Sequence
  SAMD9L targeting guide sequence portion
uuuaauguuuuaaauaugcauu

SEQ ID NO: 11846 - RNA, 22 nt, Artificial Sequence
  SAMD9L targeting guide sequence portion
uuuacauucaucuuauuuaaau

SEQ ID NO: 11847 - RNA, 22 nt, Artificial Sequence
  SAMD9L targeting guide sequence portion
uuuaccucaucuugguaucaau

SEQ ID NO: 11848 - RNA, 22 nt, Artificial Sequence
  SAMD9L targeting guide sequence portion
uuuagaaaacuuauaaaagcaa

SEQ ID NO: 11849 - RNA, 22 nt, Artificial Sequence
  SAMD9L targeting guide sequence portion
uuuauaaguuuucuaaauuauu

SEQ ID NO: 11850 - RNA, 22 nt, Artificial Sequence
  SAMD9L targeting guide sequence portion
uuuauaucuuuaugauuuuauu

SEQ ID NO: 11851 - RNA, 22 nt, Artificial Sequence
  SAMD9L targeting guide sequence portion
uuuaugauuuuauucucucucu

SEQ ID NO: 11852 - RNA, 22 nt, Artificial Sequence
  SAMD9L targeting guide sequence portion
uuuauucucucucucuauucuc

SEQ ID NO: 11853 - RNA, 22 nt, Artificial Sequence
  SAMD9L targeting guide sequence portion
uuuauugauaccaagaugaggu

SEQ ID NO: 11854 - RNA, 22 nt, Artificial Sequence
  SAMD9L targeting guide sequence portion
uuuauugcccuauagacaguua

SEQ ID NO: 11855 - RNA, 22 nt, Artificial Sequence
  SAMD9L targeting guide sequence portion
uuuauuuauaucuuuaugauuu

SEQ ID NO: 11856 - RNA, 22 nt, Artificial Sequence
  SAMD9L targeting guide sequence portion
uuucagacucaaauaauuaaga

SEQ ID NO: 11857 - RNA, 22 nt, Artificial Sequence
  SAMD9L targeting guide sequence portion
uuucauaacauuauggcuaacc

SEQ ID NO: 11858 - RNA, 22 nt, Artificial Sequence
  SAMD9L targeting guide sequence portion
uuucauaucuuaaaaaggcuug

SEQ ID NO: 11859 - RNA, 22 nt, Artificial Sequence
  SAMD9L targeting guide sequence portion
uuucauugauauccacugguca

SEQ ID NO: 11860 - RNA, 22 nt, Artificial Sequence
  SAMD9L targeting guide sequence portion
uuucuaaauuauuucuucacug

SEQ ID NO: 11861 - RNA, 22 nt, Artificial Sequence
  SAMD9L targeting guide sequence portion
uuucucuuuuacauucaucuua

SEQ ID NO: 11862 - RNA, 22 nt, Artificial Sequence
  SAMD9L targeting guide sequence portion
uuucuucacugugacagcaaag

SEQ ID NO: 11863 - RNA, 22 nt, Artificial Sequence
  SAMD9L targeting guide sequence portion
uuugaguccaauaagcuuucuc

SEQ ID NO: 11864 - RNA, 22 nt, Artificial Sequence
  SAMD9L targeting guide sequence portion
uuugagucugaaaaugcauauu

SEQ ID NO: 11865 - RNA, 22 nt, Artificial Sequence
  SAMD9L targeting guide sequence portion
uuugccucccugaaugaauuac

SEQ ID NO: 11866 - RNA, 22 nt, Artificial Sequence
  SAMD9L targeting guide sequence portion
uuugcugucacagugaagaaau

SEQ ID NO: 11867 - RNA, 22 nt, Artificial Sequence
  SAMD9L targeting guide sequence portion
uuugcuuuugccucccugaaug

SEQ ID NO: 11868 - RNA, 22 nt, Artificial Sequence
  SAMD9L targeting guide sequence portion
uuugugccaagcucugcgggua

SEQ ID NO: 11869 - RNA, 22 nt, Artificial Sequence
  SAMD9L targeting guide sequence portion
uuuuaaauaugcauuuucagac

SEQ ID NO: 11870 - RNA, 22 nt, Artificial Sequence
  SAMD9L targeting guide sequence portion
uuuuaagauaugaaauaugccu

SEQ ID NO: 11871 - RNA, 22 nt, Artificial Sequence
  SAMD9L targeting guide sequence portion
uuuuaauguuuuaaauaugcau

SEQ ID NO: 11872 - RNA, 22 nt, Artificial Sequence
  SAMD9L targeting guide sequence portion
uuuuacauucaucuuauuuaaa

SEQ ID NO: 11873 - RNA, 22 nt, Artificial Sequence
  SAMD9L targeting guide sequence portion
uuuuauaaguuuucuaaauuau

SEQ ID NO: 11874 - RNA, 22 nt, Artificial Sequence
  SAMD9L targeting guide sequence portion
uuuuauucucucucucuauucu

SEQ ID NO: 11875 - RNA, 22 nt, Artificial Sequence
  SAMD9L targeting guide sequence portion
uuuuauugauaccaagaugagg

SEQ ID NO: 11876 - RNA, 22 nt, Artificial Sequence
  SAMD9L targeting guide sequence portion
uuuuauugcccuauagacaguu

SEQ ID NO: 11877 - RNA, 22 nt, Artificial Sequence
  SAMD9L targeting guide sequence portion
uuuucagacucaaauaauuaag

SEQ ID NO: 11878 - RNA, 22 nt, Artificial Sequence
  SAMD9L targeting guide sequence portion
uuuucuaaauuauuucuucacu

SEQ ID NO: 11879 - RNA, 22 nt, Artificial Sequence
  SAMD9L targeting guide sequence portion
uuuugccucccugaaugaauua

SEQ ID NO: 11880 - RNA, 22 nt, Artificial Sequence
  SAMD9L targeting guide sequence portion
uuuugcuuuugccucccugaau

SEQ ID NO: 11881 - RNA, 22 nt, Artificial Sequence
  SAMD9L targeting guide sequence portion
uuuuuaagauaugaaauaugcc

SEQ ID NO: 11882 - RNA, 22 nt, Artificial Sequence
  SAMD9L targeting guide sequence portion
uuuuuauugauaccaagaugag

SEQ ID NO: 11883 - RNA, 20 nt, Artificial Sequence
  SAMD9L targeting guide sequence portion
aaaaaaguuauaaugaaagg

SEQ ID NO: 11884 - RNA, 20 nt, Artificial Sequence
  SAMD9L targeting guide sequence portion
aaaaacuacuaaauauuccu

SEQ ID NO: 11885 - RNA, 20 nt, Artificial Sequence
  SAMD9L targeting guide sequence portion
aaaaaguuauaaugaaagga

SEQ ID NO: 11886 - RNA, 20 nt, Artificial Sequence
  SAMD9L targeting guide sequence portion
aaaacuacuaaauauuccug

SEQ ID NO: 11887 - RNA, 20 nt, Artificial Sequence
  SAMD9L targeting guide sequence portion
aaaagaaauaggaucaggcc

SEQ ID NO: 11888 - RNA, 20 nt, Artificial Sequence
  SAMD9L targeting guide sequence portion
aaaaguuauaaugaaaggag

SEQ ID NO: 11889 - RNA, 20 nt, Artificial Sequence
  SAMD9L targeting guide sequence portion
aaacaguugccucccucuuc

SEQ ID NO: 11890 - RNA, 20 nt, Artificial Sequence
  SAMD9L targeting guide sequence portion
aaacccaauucuucuuguca

SEQ ID NO: 11891 - RNA, 20 nt, Artificial Sequence
  SAMD9L targeting guide sequence portion
aaacuacuaaauauuccugc

SEQ ID NO: 11892 - RNA, 20 nt, Artificial Sequence
  SAMD9L targeting guide sequence portion
aaacuccccugcuggacuau

SEQ ID NO: 11893 - RNA, 20 nt, Artificial Sequence
  SAMD9L targeting guide sequence portion
aaagaaauaggaucaggccu

SEQ ID NO: 11894 - RNA, 20 nt, Artificial Sequence
  SAMD9L targeting guide sequence portion
aaagagggacauguucugga

SEQ ID NO: 11895 - RNA, 20 nt, Artificial Sequence
  SAMD9L targeting guide sequence portion
aaagauaauuaugguuagca

SEQ ID NO: 11896 - RNA, 20 nt, Artificial Sequence
  SAMD9L targeting guide sequence portion
aaagcugugucugcugcuga

SEQ ID NO: 11897 - RNA, 20 nt, Artificial Sequence
  SAMD9L targeting guide sequence portion
aaaggaggaaaaacuacuaa

SEQ ID NO: 11898 - RNA, 20 nt, Artificial Sequence
  SAMD9L targeting guide sequence portion
aaaggcuugauguagagaaa

SEQ ID NO: 11899 - RNA, 20 nt, Artificial Sequence
  SAMD9L targeting guide sequence portion
aaaguuauaaugaaaggagg

SEQ ID NO: 11900 - RNA, 20 nt, Artificial Sequence
  SAMD9L targeting guide sequence portion
aaauaggaucaggccuaugu

SEQ ID NO: 11901 - RNA, 20 nt, Artificial Sequence
  SAMD9L targeting guide sequence portion
aaauauaggccagaagaacc

SEQ ID NO: 11902 - RNA, 20 nt, Artificial Sequence
  SAMD9L targeting guide sequence portion
aaauauuccugcuaaccaua

SEQ ID NO: 11903 - RNA, 20 nt, Artificial Sequence
  SAMD9L targeting guide sequence portion
aaaugggggcuaaggagaag

SEQ ID NO: 11904 - RNA, 20 nt, Artificial Sequence
  SAMD9L targeting guide sequence portion
aaauguuauaguccagcagg

SEQ ID NO: 11905 - RNA, 20 nt, Artificial Sequence
  SAMD9L targeting guide sequence portion
aacaacuuggggaguauagc

SEQ ID NO: 11906 - RNA, 20 nt, Artificial Sequence
  SAMD9L targeting guide sequence portion
aacaggaucucccaaguggc

SEQ ID NO: 11907 - RNA, 20 nt, Artificial Sequence
  SAMD9L targeting guide sequence portion
aacaguugccucccucuucu

SEQ ID NO: 11908 - RNA, 20 nt, Artificial Sequence
  SAMD9L targeting guide sequence portion
aacaugucccucuuucugaa

SEQ ID NO: 11909 - RNA, 20 nt, Artificial Sequence
  SAMD9L targeting guide sequence portion
aacauuuaguaagacauaac

SEQ ID NO: 11910 - RNA, 20 nt, Artificial Sequence
  SAMD9L targeting guide sequence portion
aaccauaauuaucuuuagag

SEQ ID NO: 11911 - RNA, 20 nt, Artificial Sequence
  SAMD9L targeting guide sequence portion
aacccaauucuucuugucau

SEQ ID NO: 11912 - RNA, 20 nt, Artificial Sequence
  SAMD9L targeting guide sequence portion
aacccugauagagcauagac

SEQ ID NO: 11913 - RNA, 20 nt, Artificial Sequence
  SAMD9L targeting guide sequence portion
aacgcucacaugguccagaa

SEQ ID NO: 11914 - RNA, 20 nt, Artificial Sequence
  SAMD9L targeting guide sequence portion
aacuaaaggcuugauguaga

SEQ ID NO: 11915 - RNA, 20 nt, Artificial Sequence
  SAMD9L targeting guide sequence portion
aacuacuaaauauuccugcu

SEQ ID NO: 11916 - RNA, 20 nt, Artificial Sequence
  SAMD9L targeting guide sequence portion
aacuccccugcuggacuaua

SEQ ID NO: 11917 - RNA, 20 nt, Artificial Sequence
  SAMD9L targeting guide sequence portion
aacucuaaagauaauuaugg

SEQ ID NO: 11918 - RNA, 20 nt, Artificial Sequence
  SAMD9L targeting guide sequence portion
aacuguuuggagcaggguca

SEQ ID NO: 11919 - RNA, 20 nt, Artificial Sequence
  SAMD9L targeting guide sequence portion
aacuuagauauucuggacuc

SEQ ID NO: 11920 - RNA, 20 nt, Artificial Sequence
  SAMD9L targeting guide sequence portion
aacuuggggaguauagccac

SEQ ID NO: 11921 - RNA, 20 nt, Artificial Sequence
  SAMD9L targeting guide sequence portion
aacuuuuuucucuacaucaa

SEQ ID NO: 11922 - RNA, 20 nt, Artificial Sequence
  SAMD9L targeting guide sequence portion
aagaaauaggaucaggccua

SEQ ID NO: 11923 - RNA, 20 nt, Artificial Sequence
  SAMD9L targeting guide sequence portion
aagaacccugauagagcaua

SEQ ID NO: 11924 - RNA, 20 nt, Artificial Sequence
  SAMD9L targeting guide sequence portion
aagaagaauuggguuuggag

SEQ ID NO: 11925 - RNA, 20 nt, Artificial Sequence
  SAMD9L targeting guide sequence portion
aagaagucuaugcucuauca

SEQ ID NO: 11926 - RNA, 20 nt, Artificial Sequence
  SAMD9L targeting guide sequence portion
aagaauuggguuuggagucc

SEQ ID NO: 11927 - RNA, 20 nt, Artificial Sequence
  SAMD9L targeting guide sequence portion
aagacauaacuaaaggcuug

SEQ ID NO: 11928 - RNA, 20 nt, Artificial Sequence
  SAMD9L targeting guide sequence portion
aagagggacauguucuggac

SEQ ID NO: 11929 - RNA, 20 nt, Artificial Sequence
  SAMD9L targeting guide sequence portion
aagagggaggcaacuguuug

SEQ ID NO: 11930 - RNA, 20 nt, Artificial Sequence
  SAMD9L targeting guide sequence portion
aagauaauuaugguuagcag

SEQ ID NO: 11931 - RNA, 20 nt, Artificial Sequence
  SAMD9L targeting guide sequence portion
aagauaccuggugguggggu

SEQ ID NO: 11932 - RNA, 20 nt, Artificial Sequence
  SAMD9L targeting guide sequence portion
aagccuuuaguuaugucuua

SEQ ID NO: 11933 - RNA, 20 nt, Artificial Sequence
  SAMD9L targeting guide sequence portion
aagcucucuaagauaccugg

SEQ ID NO: 11934 - RNA, 20 nt, Artificial Sequence
  SAMD9L targeting guide sequence portion
aagcugugucugcugcugac

SEQ ID NO: 11935 - RNA, 20 nt, Artificial Sequence
  SAMD9L targeting guide sequence portion
aaggaagcucucuaagauac

SEQ ID NO: 11936 - RNA, 20 nt, Artificial Sequence
  SAMD9L targeting guide sequence portion
aaggagaaggaagcucucua

SEQ ID NO: 11937 - RNA, 20 nt, Artificial Sequence
  SAMD9L targeting guide sequence portion
aaggaggaaaaacuacuaaa

SEQ ID NO: 11938 - RNA, 20 nt, Artificial Sequence
  SAMD9L targeting guide sequence portion
aaggcuugauguagagaaaa

SEQ ID NO: 11939 - RNA, 20 nt, Artificial Sequence
  SAMD9L targeting guide sequence portion
aagucuaugcucuaucaggg

SEQ ID NO: 11940 - RNA, 20 nt, Artificial Sequence
  SAMD9L targeting guide sequence portion
aaguggcuauacuccccaag

SEQ ID NO: 11941 - RNA, 20 nt, Artificial Sequence
  SAMD9L targeting guide sequence portion
aaguuacauuacaaagagau

SEQ ID NO: 11942 - RNA, 20 nt, Artificial Sequence
  SAMD9L targeting guide sequence portion
aaguuauaaugaaaggagga

SEQ ID NO: 11943 - RNA, 20 nt, Artificial Sequence
  SAMD9L targeting guide sequence portion
aaguuguucauaggccuggg

SEQ ID NO: 11944 - RNA, 20 nt, Artificial Sequence
  SAMD9L targeting guide sequence portion
aauaauucugaccccaccac

SEQ ID NO: 11945 - RNA, 20 nt, Artificial Sequence
  SAMD9L targeting guide sequence portion
aauaggaucaggccuauguc

SEQ ID NO: 11946 - RNA, 20 nt, Artificial Sequence
  SAMD9L targeting guide sequence portion
aauauaggccagaagaaccc

SEQ ID NO: 11947 - RNA, 20 nt, Artificial Sequence
  SAMD9L targeting guide sequence portion
aauaucuaaguuacauuaca

SEQ ID NO: 11948 - RNA, 20 nt, Artificial Sequence
  SAMD9L targeting guide sequence portion
aauauuccugcuaaccauaa

SEQ ID NO: 11949 - RNA, 20 nt, Artificial Sequence
  SAMD9L targeting guide sequence portion
aauauuuaguaguuuuuccu

SEQ ID NO: 11950 - RNA, 20 nt, Artificial Sequence
  SAMD9L targeting guide sequence portion
aaucugggcaacgcucacau

SEQ ID NO: 11951 - RNA, 20 nt, Artificial Sequence
  SAMD9L targeting guide sequence portion
aaugaaaggaggaaaaacua

SEQ ID NO: 11952 - RNA, 20 nt, Artificial Sequence
  SAMD9L targeting guide sequence portion
aaugggggcuaaggagaagg

SEQ ID NO: 11953 - RNA, 20 nt, Artificial Sequence
  SAMD9L targeting guide sequence portion
aauguaacuuagauauucug

SEQ ID NO: 11954 - RNA, 20 nt, Artificial Sequence
  SAMD9L targeting guide sequence portion
aauguuauaguccagcaggg

SEQ ID NO: 11955 - RNA, 20 nt, Artificial Sequence
  SAMD9L targeting guide sequence portion
aauuaucuuuagaguuaaua

SEQ ID NO: 11956 - RNA, 20 nt, Artificial Sequence
  SAMD9L targeting guide sequence portion
aauuaugguuagcaggaaua

SEQ ID NO: 11957 - RNA, 20 nt, Artificial Sequence
  SAMD9L targeting guide sequence portion
aauuauuaacucuaaagaua

SEQ ID NO: 11958 - RNA, 20 nt, Artificial Sequence
  SAMD9L targeting guide sequence portion
aauucugaccccaccaccag

SEQ ID NO: 11959 - RNA, 20 nt, Artificial Sequence
  SAMD9L targeting guide sequence portion
aauucuucuugucaucaaga

SEQ ID NO: 11960 - RNA, 20 nt, Artificial Sequence
  SAMD9L targeting guide sequence portion
aauuggguuuggaguccaga

SEQ ID NO: 11961 - RNA, 20 nt, Artificial Sequence
  SAMD9L targeting guide sequence portion
acaacuuggggaguauagcc

SEQ ID NO: 11962 - RNA, 20 nt, Artificial Sequence
  SAMD9L targeting guide sequence portion
acaagaagaauuggguuugg

SEQ ID NO: 11963 - RNA, 20 nt, Artificial Sequence
  SAMD9L targeting guide sequence portion
acacagcuuucagaaagagg

SEQ ID NO: 11964 - RNA, 20 nt, Artificial Sequence
  SAMD9L targeting guide sequence portion
acagcuuucagaaagaggga

SEQ ID NO: 11965 - RNA, 20 nt, Artificial Sequence
  SAMD9L targeting guide sequence portion
acaggaucucccaaguggcu

SEQ ID NO: 11966 - RNA, 20 nt, Artificial Sequence
  SAMD9L targeting guide sequence portion
acaguaacaggaucucccaa

SEQ ID NO: 11967 - RNA, 20 nt, Artificial Sequence
  SAMD9L targeting guide sequence portion
acaguugccucccucuucug

SEQ ID NO: 11968 - RNA, 20 nt, Artificial Sequence
  SAMD9L targeting guide sequence portion
acauaacuaaaggcuugaug

SEQ ID NO: 11969 - RNA, 20 nt, Artificial Sequence
  SAMD9L targeting guide sequence portion
acauaggccugauccuauuu

SEQ ID NO: 11970 - RNA, 20 nt, Artificial Sequence
  SAMD9L targeting guide sequence portion
acaucaagccuuuaguuaug

SEQ ID NO: 11971 - RNA, 20 nt, Artificial Sequence
  SAMD9L targeting guide sequence portion
acaucuuuguaucucuuugu

SEQ ID NO: 11972 - RNA, 20 nt, Artificial Sequence
  SAMD9L targeting guide sequence portion
acaugguccagaacaugucc

SEQ ID NO: 11973 - RNA, 20 nt, Artificial Sequence
  SAMD9L targeting guide sequence portion
acaugucccucuuucugaaa

SEQ ID NO: 11974 - RNA, 20 nt, Artificial Sequence
  SAMD9L targeting guide sequence portion
acauguucuggaccauguga

SEQ ID NO: 11975 - RNA, 20 nt, Artificial Sequence
  SAMD9L targeting guide sequence portion
acauuuaguaagacauaacu

SEQ ID NO: 11976 - RNA, 20 nt, Artificial Sequence
  SAMD9L targeting guide sequence portion
accaccagguaucuuagaga

SEQ ID NO: 11977 - RNA, 20 nt, Artificial Sequence
  SAMD9L targeting guide sequence portion
accagguaucuuagagagcu

SEQ ID NO: 11978 - RNA, 20 nt, Artificial Sequence
  SAMD9L targeting guide sequence portion
accaguccauacaguaacag

SEQ ID NO: 11979 - RNA, 20 nt, Artificial Sequence
  SAMD9L targeting guide sequence portion
accauaauuaucuuuagagu

SEQ ID NO: 11980 - RNA, 20 nt, Artificial Sequence
  SAMD9L targeting guide sequence portion
accaugugagcguugcccag

SEQ ID NO: 11981 - RNA, 20 nt, Artificial Sequence
  SAMD9L targeting guide sequence portion
acccaauucuucuugucauc

SEQ ID NO: 11982 - RNA, 20 nt, Artificial Sequence
  SAMD9L targeting guide sequence portion
accccaccaccagguaucuu

SEQ ID NO: 11983 - RNA, 20 nt, Artificial Sequence
  SAMD9L targeting guide sequence portion
acccugauagagcauagacu

SEQ ID NO: 11984 - RNA, 20 nt, Artificial Sequence
  SAMD9L targeting guide sequence portion
acccugcuccaaacaguugc

SEQ ID NO: 11985 - RNA, 20 nt, Artificial Sequence
  SAMD9L targeting guide sequence portion
accuggugguggggucagaa

SEQ ID NO: 11986 - RNA, 20 nt, Artificial Sequence
  SAMD9L targeting guide sequence portion
acgcucacaugguccagaac

SEQ ID NO: 11987 - RNA, 20 nt, Artificial Sequence
  SAMD9L targeting guide sequence portion
acuaaaggcuugauguagag

SEQ ID NO: 11988 - RNA, 20 nt, Artificial Sequence
  SAMD9L targeting guide sequence portion
acuaaauauuccugcuaacc

SEQ ID NO: 11989 - RNA, 20 nt, Artificial Sequence
  SAMD9L targeting guide sequence portion
acuaaauguuauaguccagc

SEQ ID NO: 11990 - RNA, 20 nt, Artificial Sequence
  SAMD9L targeting guide sequence portion
acuacuaaauauuccugcua

SEQ ID NO: 11991 - RNA, 20 nt, Artificial Sequence
  SAMD9L targeting guide sequence portion
acuauaacauuuaguaagac

SEQ ID NO: 11992 - RNA, 20 nt, Artificial Sequence
  SAMD9L targeting guide sequence portion
acuccaaacccaauucuucu

SEQ ID NO: 11993 - RNA, 20 nt, Artificial Sequence
  SAMD9L targeting guide sequence portion
acuccccaaguuguucauag

SEQ ID NO: 11994 - RNA, 20 nt, Artificial Sequence
  SAMD9L targeting guide sequence portion
acuccccugcuggacuauaa

SEQ ID NO: 11995 - RNA, 20 nt, Artificial Sequence
  SAMD9L targeting guide sequence portion
acucuaaagauaauuauggu

SEQ ID NO: 11996 - RNA, 20 nt, Artificial Sequence
  SAMD9L targeting guide sequence portion
acugcagaagagggaggcaa

SEQ ID NO: 11997 - RNA, 20 nt, Artificial Sequence
  SAMD9L targeting guide sequence portion
acugguggacugcagaagag

SEQ ID NO: 11998 - RNA, 20 nt, Artificial Sequence
  SAMD9L targeting guide sequence portion
acuguauggacugguggacu

SEQ ID NO: 11999 - RNA, 20 nt, Artificial Sequence
  SAMD9L targeting guide sequence portion
acuguuuggagcagggucag

SEQ ID NO: 12000 - RNA, 20 nt, Artificial Sequence
  SAMD9L targeting guide sequence portion
acuuagauauucuggacucc

SEQ ID NO: 12001 - RNA, 20 nt, Artificial Sequence
  SAMD9L targeting guide sequence portion
acuucuugaugacaagaaga

SEQ ID NO: 12002 - RNA, 20 nt, Artificial Sequence
  SAMD9L targeting guide sequence portion
acuugggagauccuguuacu

SEQ ID NO: 12003 - RNA, 20 nt, Artificial Sequence
  SAMD9L targeting guide sequence portion
acuuggggaguauagccacu

SEQ ID NO: 12004 - RNA, 20 nt, Artificial Sequence
  SAMD9L targeting guide sequence portion
acuuuuuucucuacaucaag

SEQ ID NO: 12005 - RNA, 20 nt, Artificial Sequence
  SAMD9L targeting guide sequence portion
agaaaaaaguuauaaugaaa

SEQ ID NO: 12006 - RNA, 20 nt, Artificial Sequence
  SAMD9L targeting guide sequence portion
agaaagagggacauguucug

SEQ ID NO: 12007 - RNA, 20 nt, Artificial Sequence
  SAMD9L targeting guide sequence portion
agaaauaggaucaggccuau

SEQ ID NO: 12008 - RNA, 20 nt, Artificial Sequence
  SAMD9L targeting guide sequence portion
agaaauauaggccagaagaa

SEQ ID NO: 12009 - RNA, 20 nt, Artificial Sequence
  SAMD9L targeting guide sequence portion
agaacaugucccucuuucug

SEQ ID NO: 12010 - RNA, 20 nt, Artificial Sequence
  SAMD9L targeting guide sequence portion
agaacccugauagagcauag

SEQ ID NO: 12011 - RNA, 20 nt, Artificial Sequence
  SAMD9L targeting guide sequence portion
agaagaacccugauagagca

SEQ ID NO: 12012 - RNA, 20 nt, Artificial Sequence
  SAMD9L targeting guide sequence portion
agaagaauuggguuuggagu

SEQ ID NO: 12013 - RNA, 20 nt, Artificial Sequence
  SAMD9L targeting guide sequence portion
agaagagggaggcaacuguu

SEQ ID NO: 12014 - RNA, 20 nt, Artificial Sequence
  SAMD9L targeting guide sequence portion
agaaggaagcucucuaagau

SEQ ID NO: 12015 - RNA, 20 nt, Artificial Sequence
  SAMD9L targeting guide sequence portion
agaagucuaugcucuaucag

SEQ ID NO: 12016 - RNA, 20 nt, Artificial Sequence
  SAMD9L targeting guide sequence portion
agaauaucuaaguuacauua

SEQ ID NO: 12017 - RNA, 20 nt, Artificial Sequence
  SAMD9L targeting guide sequence portion
agaauuauuaacucuaaaga

SEQ ID NO: 12018 - RNA, 20 nt, Artificial Sequence
  SAMD9L targeting guide sequence portion
agaauuggguuuggagucca

SEQ ID NO: 12019 - RNA, 20 nt, Artificial Sequence
  SAMD9L targeting guide sequence portion
agacacagcuuucagaaaga

SEQ ID NO: 12020 - RNA, 20 nt, Artificial Sequence
  SAMD9L targeting guide sequence portion
agacauaacuaaaggcuuga

SEQ ID NO: 12021 - RNA, 20 nt, Artificial Sequence
  SAMD9L targeting guide sequence portion
agacuucuugaugacaagaa

SEQ ID NO: 12022 - RNA, 20 nt, Artificial Sequence
  SAMD9L targeting guide sequence portion
agagaaaaaaguuauaauga

SEQ ID NO: 12023 - RNA, 20 nt, Artificial Sequence
  SAMD9L targeting guide sequence portion
agagagcuuccuucuccuua

SEQ ID NO: 12024 - RNA, 20 nt, Artificial Sequence
  SAMD9L targeting guide sequence portion
agagcauagacuucuugaug

SEQ ID NO: 12025 - RNA, 20 nt, Artificial Sequence
  SAMD9L targeting guide sequence portion
agagcuuccuucuccuuagc

SEQ ID NO: 12026 - RNA, 20 nt, Artificial Sequence
  SAMD9L targeting guide sequence portion
agagggacauguucuggacc

SEQ ID NO: 12027 - RNA, 20 nt, Artificial Sequence
  SAMD9L targeting guide sequence portion
agagggaggcaacuguuugg

SEQ ID NO: 12028 - RNA, 20 nt, Artificial Sequence
  SAMD9L targeting guide sequence portion
agaguuaauaauucugaccc

SEQ ID NO: 12029 - RNA, 20 nt, Artificial Sequence
  SAMD9L targeting guide sequence portion
agauaauuaugguuagcagg

SEQ ID NO: 12030 - RNA, 20 nt, Artificial Sequence
  SAMD9L targeting guide sequence portion
agauaccugguggugggguc

SEQ ID NO: 12031 - RNA, 20 nt, Artificial Sequence
  SAMD9L targeting guide sequence portion
agauauucuggacuccaaac

SEQ ID NO: 12032 - RNA, 20 nt, Artificial Sequence
  SAMD9L targeting guide sequence portion
agauccuguuacuguaugga

SEQ ID NO: 12033 - RNA, 20 nt, Artificial Sequence
  SAMD9L targeting guide sequence portion
agauucauagaaauauaggc

SEQ ID NO: 12034 - RNA, 20 nt, Artificial Sequence
  SAMD9L targeting guide sequence portion
agcagacacagcuuucagaa

SEQ ID NO: 12035 - RNA, 20 nt, Artificial Sequence
  SAMD9L targeting guide sequence portion
agcagcagacacagcuuuca

SEQ ID NO: 12036 - RNA, 20 nt, Artificial Sequence
  SAMD9L targeting guide sequence portion
agcaggaauauuuaguaguu

SEQ ID NO: 12037 - RNA, 20 nt, Artificial Sequence
  SAMD9L targeting guide sequence portion
agcaggggaguuuaaaagaa

SEQ ID NO: 12038 - RNA, 20 nt, Artificial Sequence
  SAMD9L targeting guide sequence portion
agcagggucagcagcagaca

SEQ ID NO: 12039 - RNA, 20 nt, Artificial Sequence
  SAMD9L targeting guide sequence portion
agcauagacuucuugaugac

SEQ ID NO: 12040 - RNA, 20 nt, Artificial Sequence
  SAMD9L targeting guide sequence portion
agccacuugggagauccugu

SEQ ID NO: 12041 - RNA, 20 nt, Artificial Sequence
  SAMD9L targeting guide sequence portion
agccuuuaguuaugucuuac

SEQ ID NO: 12042 - RNA, 20 nt, Artificial Sequence
  SAMD9L targeting guide sequence portion
agcguugcccagauucauag

SEQ ID NO: 12043 - RNA, 20 nt, Artificial Sequence
  SAMD9L targeting guide sequence portion
agcucucuaagauaccuggu

SEQ ID NO: 12044 - RNA, 20 nt, Artificial Sequence
  SAMD9L targeting guide sequence portion
agcugugucugcugcugacc

SEQ ID NO: 12045 - RNA, 20 nt, Artificial Sequence
  SAMD9L targeting guide sequence portion
agcuuccuucuccuuagccc

SEQ ID NO: 12046 - RNA, 20 nt, Artificial Sequence
  SAMD9L targeting guide sequence portion
agcuuucagaaagagggaca

SEQ ID NO: 12047 - RNA, 20 nt, Artificial Sequence
  SAMD9L targeting guide sequence portion
aggaaaaacuacuaaauauu

SEQ ID NO: 12048 - RNA, 20 nt, Artificial Sequence
  SAMD9L targeting guide sequence portion
aggaagcucucuaagauacc

SEQ ID NO: 12049 - RNA, 20 nt, Artificial Sequence
  SAMD9L targeting guide sequence portion
aggaauauuuaguaguuuuu

SEQ ID NO: 12050 - RNA, 20 nt, Artificial Sequence
  SAMD9L targeting guide sequence portion
aggagaaggaagcucucuaa

SEQ ID NO: 12051 - RNA, 20 nt, Artificial Sequence
  SAMD9L targeting guide sequence portion
aggaggaaaaacuacuaaau

SEQ ID NO: 12052 - RNA, 20 nt, Artificial Sequence
  SAMD9L targeting guide sequence portion
aggaucaggccuaugucccc

SEQ ID NO: 12053 - RNA, 20 nt, Artificial Sequence
  SAMD9L targeting guide sequence portion
aggaucucccaaguggcuau

SEQ ID NO: 12054 - RNA, 20 nt, Artificial Sequence
  SAMD9L targeting guide sequence portion
aggcaacuguuuggagcagg

SEQ ID NO: 12055 - RNA, 20 nt, Artificial Sequence
  SAMD9L targeting guide sequence portion
aggccagaagaacccugaua

SEQ ID NO: 12056 - RNA, 20 nt, Artificial Sequence
  SAMD9L targeting guide sequence portion
aggccuaugaacaacuuggg

SEQ ID NO: 12057 - RNA, 20 nt, Artificial Sequence
  SAMD9L targeting guide sequence portion
aggccuauguccccaggccu

SEQ ID NO: 12058 - RNA, 20 nt, Artificial Sequence
  SAMD9L targeting guide sequence portion
aggccugauccuauuucuuu

SEQ ID NO: 12059 - RNA, 20 nt, Artificial Sequence
  SAMD9L targeting guide sequence portion
aggccuggggacauaggccu

SEQ ID NO: 12060 - RNA, 20 nt, Artificial Sequence
  SAMD9L targeting guide sequence portion
aggcuugauguagagaaaaa

SEQ ID NO: 12061 - RNA, 20 nt, Artificial Sequence
  SAMD9L targeting guide sequence portion
agggacauguucuggaccau

SEQ ID NO: 12062 - RNA, 20 nt, Artificial Sequence
  SAMD9L targeting guide sequence portion
agggaggcaacuguuuggag

SEQ ID NO: 12063 - RNA, 20 nt, Artificial Sequence
  SAMD9L targeting guide sequence portion
aggggaguuuaaaagaaaua

SEQ ID NO: 12064 - RNA, 20 nt, Artificial Sequence
  SAMD9L targeting guide sequence portion
agggucagcagcagacacag

SEQ ID NO: 12065 - RNA, 20 nt, Artificial Sequence
  SAMD9L targeting guide sequence portion
aggguucuucuggccuauau

SEQ ID NO: 12066 - RNA, 20 nt, Artificial Sequence
  SAMD9L targeting guide sequence portion
agguaucuuagagagcuucc

SEQ ID NO: 12067 - RNA, 20 nt, Artificial Sequence
  SAMD9L targeting guide sequence portion
aguaacaggaucucccaagu

SEQ ID NO: 12068 - RNA, 20 nt, Artificial Sequence
  SAMD9L targeting guide sequence portion
aguaagacauaacuaaaggc

SEQ ID NO: 12069 - RNA, 20 nt, Artificial Sequence
  SAMD9L targeting guide sequence portion
aguaguuuuuccuccuuuca

SEQ ID NO: 12070 - RNA, 20 nt, Artificial Sequence
  SAMD9L targeting guide sequence portion
aguauagccacuugggagau

SEQ ID NO: 12071 - RNA, 20 nt, Artificial Sequence
  SAMD9L targeting guide sequence portion
aguccaccaguccauacagu

SEQ ID NO: 12072 - RNA, 20 nt, Artificial Sequence
  SAMD9L targeting guide sequence portion
aguccagaauaucuaaguua

SEQ ID NO: 12073 - RNA, 20 nt, Artificial Sequence
  SAMD9L targeting guide sequence portion
aguccagcaggggaguuuaa

SEQ ID NO: 12074 - RNA, 20 nt, Artificial Sequence
  SAMD9L targeting guide sequence portion
aguccauacaguaacaggau

SEQ ID NO: 12075 - RNA, 20 nt, Artificial Sequence
  SAMD9L targeting guide sequence portion
agucuaugcucuaucagggu

SEQ ID NO: 12076 - RNA, 20 nt, Artificial Sequence
  SAMD9L targeting guide sequence portion
aguggcuauacuccccaagu

SEQ ID NO: 12077 - RNA, 20 nt, Artificial Sequence
  SAMD9L targeting guide sequence portion
aguuaauaauucugacccca

SEQ ID NO: 12078 - RNA, 20 nt, Artificial Sequence
  SAMD9L targeting guide sequence portion
aguuacauuacaaagagaua

SEQ ID NO: 12079 - RNA, 20 nt, Artificial Sequence
  SAMD9L targeting guide sequence portion
aguuauaaugaaaggaggaa

SEQ ID NO: 12080 - RNA, 20 nt, Artificial Sequence
  SAMD9L targeting guide sequence portion
aguuaugucuuacuaaaugu

SEQ ID NO: 12081 - RNA, 20 nt, Artificial Sequence
  SAMD9L targeting guide sequence portion
aguugccucccucuucugca

SEQ ID NO: 12082 - RNA, 20 nt, Artificial Sequence
  SAMD9L targeting guide sequence portion
aguuguucauaggccugggg

SEQ ID NO: 12083 - RNA, 20 nt, Artificial Sequence
  SAMD9L targeting guide sequence portion
aguuuaaaagaaauaggauc

SEQ ID NO: 12084 - RNA, 20 nt, Artificial Sequence
  SAMD9L targeting guide sequence portion
aguuuuuccuccuuucauua

SEQ ID NO: 12085 - RNA, 20 nt, Artificial Sequence
  SAMD9L targeting guide sequence portion
auaacauuuaguaagacaua

SEQ ID NO: 12086 - RNA, 20 nt, Artificial Sequence
  SAMD9L targeting guide sequence portion
auaacuaaaggcuugaugua

SEQ ID NO: 12087 - RNA, 20 nt, Artificial Sequence
  SAMD9L targeting guide sequence portion
auaacuuuuuucucuacauc

SEQ ID NO: 12088 - RNA, 20 nt, Artificial Sequence
  SAMD9L targeting guide sequence portion
auaaugaaaggaggaaaaac

SEQ ID NO: 12089 - RNA, 20 nt, Artificial Sequence
  SAMD9L targeting guide sequence portion
auaauuaucuuuagaguuaa

SEQ ID NO: 12090 - RNA, 20 nt, Artificial Sequence
  SAMD9L targeting guide sequence portion
auaauuaugguuagcaggaa

SEQ ID NO: 12091 - RNA, 20 nt, Artificial Sequence
  SAMD9L targeting guide sequence portion
auaauucugaccccaccacc

SEQ ID NO: 12092 - RNA, 20 nt, Artificial Sequence
  SAMD9L targeting guide sequence portion
auacaguaacaggaucuccc

SEQ ID NO: 12093 - RNA, 20 nt, Artificial Sequence
  SAMD9L targeting guide sequence portion
auaccuggugguggggucag

SEQ ID NO: 12094 - RNA, 20 nt, Artificial Sequence
  SAMD9L targeting guide sequence portion
auacuccccaaguuguucau

SEQ ID NO: 12095 - RNA, 20 nt, Artificial Sequence
  SAMD9L targeting guide sequence portion
auagaaauauaggccagaag

SEQ ID NO: 12096 - RNA, 20 nt, Artificial Sequence
  SAMD9L targeting guide sequence portion
auagacuucuugaugacaag

SEQ ID NO: 12097 - RNA, 20 nt, Artificial Sequence
  SAMD9L targeting guide sequence portion
auagagcauagacuucuuga

SEQ ID NO: 12098 - RNA, 20 nt, Artificial Sequence
  SAMD9L targeting guide sequence portion
auagccacuugggagauccu

SEQ ID NO: 12099 - RNA, 20 nt, Artificial Sequence
  SAMD9L targeting guide sequence portion
auaggaucaggccuaugucc

SEQ ID NO: 12100 - RNA, 20 nt, Artificial Sequence
  SAMD9L targeting guide sequence portion
auaggccagaagaacccuga

SEQ ID NO: 12101 - RNA, 20 nt, Artificial Sequence
  SAMD9L targeting guide sequence portion
auaggccugauccuauuucu

SEQ ID NO: 12102 - RNA, 20 nt, Artificial Sequence
  SAMD9L targeting guide sequence portion
auaggccuggggacauaggc

SEQ ID NO: 12103 - RNA, 20 nt, Artificial Sequence
  SAMD9L targeting guide sequence portion
auaguccagcaggggaguuu

SEQ ID NO: 12104 - RNA, 20 nt, Artificial Sequence
  SAMD9L targeting guide sequence portion
auauaggccagaagaacccu

SEQ ID NO: 12105 - RNA, 20 nt, Artificial Sequence
  SAMD9L targeting guide sequence portion
auaucuaaguuacauuacaa

SEQ ID NO: 12106 - RNA, 20 nt, Artificial Sequence
  SAMD9L targeting guide sequence portion
auauuccugcuaaccauaau

SEQ ID NO: 12107 - RNA, 20 nt, Artificial Sequence
  SAMD9L targeting guide sequence portion
auauucuggacuccaaaccc

SEQ ID NO: 12108 - RNA, 20 nt, Artificial Sequence
  SAMD9L targeting guide sequence portion
auauuuaguaguuuuuccuc

SEQ ID NO: 12109 - RNA, 20 nt, Artificial Sequence
  SAMD9L targeting guide sequence portion
auauuucuaugaaucugggc

SEQ ID NO: 12110 - RNA, 20 nt, Artificial Sequence
  SAMD9L targeting guide sequence portion
aucaagaagucuaugcucua

SEQ ID NO: 12111 - RNA, 20 nt, Artificial Sequence
  SAMD9L targeting guide sequence portion
aucaagccuuuaguuauguc

SEQ ID NO: 12112 - RNA, 20 nt, Artificial Sequence
  SAMD9L targeting guide sequence portion
aucaggccuauguccccagg

SEQ ID NO: 12113 - RNA, 20 nt, Artificial Sequence
  SAMD9L targeting guide sequence portion
aucaggguucuucuggccua

SEQ ID NO: 12114 - RNA, 20 nt, Artificial Sequence
  SAMD9L targeting guide sequence portion
auccuauuucuuuuaaacuc

SEQ ID NO: 12115 - RNA, 20 nt, Artificial Sequence
  SAMD9L targeting guide sequence portion
auccuguuacuguauggacu

SEQ ID NO: 12116 - RNA, 20 nt, Artificial Sequence
  SAMD9L targeting guide sequence portion
aucuaaguuacauuacaaag

SEQ ID NO: 12117 - RNA, 20 nt, Artificial Sequence
  SAMD9L targeting guide sequence portion
aucucccaaguggcuauacu

SEQ ID NO: 12118 - RNA, 20 nt, Artificial Sequence
  SAMD9L targeting guide sequence portion
aucucuuuguaauguaacuu

SEQ ID NO: 12119 - RNA, 20 nt, Artificial Sequence
  SAMD9L targeting guide sequence portion
aucugggcaacgcucacaug

SEQ ID NO: 12120 - RNA, 20 nt, Artificial Sequence
  SAMD9L targeting guide sequence portion
aucuuagagagcuuccuucu

SEQ ID NO: 12121 - RNA, 20 nt, Artificial Sequence
  SAMD9L targeting guide sequence portion
aucuuuagaguuaauaauuc

SEQ ID NO: 12122 - RNA, 20 nt, Artificial Sequence
  SAMD9L targeting guide sequence portion
aucuuuguaucucuuuguaa

SEQ ID NO: 12123 - RNA, 20 nt, Artificial Sequence
  SAMD9L targeting guide sequence portion
augaaaggaggaaaaacuac

SEQ ID NO: 12124 - RNA, 20 nt, Artificial Sequence
  SAMD9L targeting guide sequence portion
augaacaacuuggggaguau

SEQ ID NO: 12125 - RNA, 20 nt, Artificial Sequence
  SAMD9L targeting guide sequence portion
augaaucugggcaacgcuca

SEQ ID NO: 12126 - RNA, 20 nt, Artificial Sequence
  SAMD9L targeting guide sequence portion
augacaagaagaauuggguu

SEQ ID NO: 12127 - RNA, 20 nt, Artificial Sequence
  SAMD9L targeting guide sequence portion
augcucuaucaggguucuuc

SEQ ID NO: 12128 - RNA, 20 nt, Artificial Sequence
  SAMD9L targeting guide sequence portion
auggacugguggacugcaga

SEQ ID NO: 12129 - RNA, 20 nt, Artificial Sequence
  SAMD9L targeting guide sequence portion
augggggcuaaggagaagga

SEQ ID NO: 12130 - RNA, 20 nt, Artificial Sequence
  SAMD9L targeting guide sequence portion
augguccagaacaugucccu

SEQ ID NO: 12131 - RNA, 20 nt, Artificial Sequence
  SAMD9L targeting guide sequence portion
augguuagcaggaauauuua

SEQ ID NO: 12132 - RNA, 20 nt, Artificial Sequence
  SAMD9L targeting guide sequence portion
auguaacuuagauauucugg

SEQ ID NO: 12133 - RNA, 20 nt, Artificial Sequence
  SAMD9L targeting guide sequence portion
auguagagaaaaaaguuaua

SEQ ID NO: 12134 - RNA, 20 nt, Artificial Sequence
  SAMD9L targeting guide sequence portion
auguccccaggccuaugaac

SEQ ID NO: 12135 - RNA, 20 nt, Artificial Sequence
  SAMD9L targeting guide sequence portion
augucccucuuucugaaagc

SEQ ID NO: 12136 - RNA, 20 nt, Artificial Sequence
  SAMD9L targeting guide sequence portion
augucuuacuaaauguuaua

SEQ ID NO: 12137 - RNA, 20 nt, Artificial Sequence
  SAMD9L targeting guide sequence portion
augugagcguugcccagauu

SEQ ID NO: 12138 - RNA, 20 nt, Artificial Sequence
  SAMD9L targeting guide sequence portion
auguuauaguccagcagggg

SEQ ID NO: 12139 - RNA, 20 nt, Artificial Sequence
  SAMD9L targeting guide sequence portion
auguucuggaccaugugagc

SEQ ID NO: 12140 - RNA, 20 nt, Artificial Sequence
  SAMD9L targeting guide sequence portion
auuaacucuaaagauaauua

SEQ ID NO: 12141 - RNA, 20 nt, Artificial Sequence
  SAMD9L targeting guide sequence portion
auuauaacuuuuuucucuac

SEQ ID NO: 12142 - RNA, 20 nt, Artificial Sequence
  SAMD9L targeting guide sequence portion
auuaucuuuagaguuaauaa

SEQ ID NO: 12143 - RNA, 20 nt, Artificial Sequence
  SAMD9L targeting guide sequence portion
auuaugguuagcaggaauau

SEQ ID NO: 12144 - RNA, 20 nt, Artificial Sequence
  SAMD9L targeting guide sequence portion
auuauuaacucuaaagauaa

SEQ ID NO: 12145 - RNA, 20 nt, Artificial Sequence
  SAMD9L targeting guide sequence portion
auucauagaaauauaggcca

SEQ ID NO: 12146 - RNA, 20 nt, Artificial Sequence
  SAMD9L targeting guide sequence portion
auuccugcuaaccauaauua

SEQ ID NO: 12147 - RNA, 20 nt, Artificial Sequence
  SAMD9L targeting guide sequence portion
auucugaccccaccaccagg

SEQ ID NO: 12148 - RNA, 20 nt, Artificial Sequence
  SAMD9L targeting guide sequence portion
auucuggacuccaaacccaa

SEQ ID NO: 12149 - RNA, 20 nt, Artificial Sequence
  SAMD9L targeting guide sequence portion
auucuucuugucaucaagaa

SEQ ID NO: 12150 - RNA, 20 nt, Artificial Sequence
  SAMD9L targeting guide sequence portion
auuggguuuggaguccagaa

SEQ ID NO: 12151 - RNA, 20 nt, Artificial Sequence
  SAMD9L targeting guide sequence portion
auuuaguaagacauaacuaa

SEQ ID NO: 12152 - RNA, 20 nt, Artificial Sequence
  SAMD9L targeting guide sequence portion
auuuaguaguuuuuccuccu

SEQ ID NO: 12153 - RNA, 20 nt, Artificial Sequence
  SAMD9L targeting guide sequence portion
auuucuaugaaucugggcaa

SEQ ID NO: 12154 - RNA, 20 nt, Artificial Sequence
  SAMD9L targeting guide sequence portion
auuucuuuuaaacuccccug

SEQ ID NO: 12155 - RNA, 20 nt, Artificial Sequence
  SAMD9L targeting guide sequence portion
caaacaguugccucccucuu

SEQ ID NO: 12156 - RNA, 20 nt, Artificial Sequence
  SAMD9L targeting guide sequence portion
caaacccaauucuucuuguc

SEQ ID NO: 12157 - RNA, 20 nt, Artificial Sequence
  SAMD9L targeting guide sequence portion
caacgcucacaugguccaga

SEQ ID NO: 12158 - RNA, 20 nt, Artificial Sequence
  SAMD9L targeting guide sequence portion
caacuguuuggagcaggguc

SEQ ID NO: 12159 - RNA, 20 nt, Artificial Sequence
  SAMD9L targeting guide sequence portion
caacuuggggaguauagcca

SEQ ID NO: 12160 - RNA, 20 nt, Artificial Sequence
  SAMD9L targeting guide sequence portion
caagaagaauuggguuugga

SEQ ID NO: 12161 - RNA, 20 nt, Artificial Sequence
  SAMD9L targeting guide sequence portion
caagaagucuaugcucuauc

SEQ ID NO: 12162 - RNA, 20 nt, Artificial Sequence
  SAMD9L targeting guide sequence portion
caagccuuuaguuaugucuu

SEQ ID NO: 12163 - RNA, 20 nt, Artificial Sequence
  SAMD9L targeting guide sequence portion
caaguggcuauacuccccaa

SEQ ID NO: 12164 - RNA, 20 nt, Artificial Sequence
  SAMD9L targeting guide sequence portion
caaguuguucauaggccugg

SEQ ID NO: 12165 - RNA, 20 nt, Artificial Sequence
  SAMD9L targeting guide sequence portion
caauucuucuugucaucaag

SEQ ID NO: 12166 - RNA, 20 nt, Artificial Sequence
  SAMD9L targeting guide sequence portion
cacagcuuucagaaagaggg

SEQ ID NO: 12167 - RNA, 20 nt, Artificial Sequence
  SAMD9L targeting guide sequence portion
cacaugguccagaacauguc

SEQ ID NO: 12168 - RNA, 20 nt, Artificial Sequence
  SAMD9L targeting guide sequence portion
caccaccagguaucuuagag

SEQ ID NO: 12169 - RNA, 20 nt, Artificial Sequence
  SAMD9L targeting guide sequence portion
caccagguaucuuagagagc

SEQ ID NO: 12170 - RNA, 20 nt, Artificial Sequence
  SAMD9L targeting guide sequence portion
caccaguccauacaguaaca

SEQ ID NO: 12171 - RNA, 20 nt, Artificial Sequence
  SAMD9L targeting guide sequence portion
cacuugggagauccuguuac

SEQ ID NO: 12172 - RNA, 20 nt, Artificial Sequence
  SAMD9L targeting guide sequence portion
cagaaagagggacauguucu

SEQ ID NO: 12173 - RNA, 20 nt, Artificial Sequence
  SAMD9L targeting guide sequence portion
cagaacaugucccucuuucu

SEQ ID NO: 12174 - RNA, 20 nt, Artificial Sequence
  SAMD9L targeting guide sequence portion
cagaagaacccugauagagc

SEQ ID NO: 12175 - RNA, 20 nt, Artificial Sequence
  SAMD9L targeting guide sequence portion
cagaagagggaggcaacugu

SEQ ID NO: 12176 - RNA, 20 nt, Artificial Sequence
  SAMD9L targeting guide sequence portion
cagaauaucuaaguuacauu

SEQ ID NO: 12177 - RNA, 20 nt, Artificial Sequence
  SAMD9L targeting guide sequence portion
cagaauuauuaacucuaaag

SEQ ID NO: 12178 - RNA, 20 nt, Artificial Sequence
  SAMD9L targeting guide sequence portion
cagacacagcuuucagaaag

SEQ ID NO: 12179 - RNA, 20 nt, Artificial Sequence
  SAMD9L targeting guide sequence portion
cagauucauagaaauauagg

SEQ ID NO: 12180 - RNA, 20 nt, Artificial Sequence
  SAMD9L targeting guide sequence portion
cagcagacacagcuuucaga

SEQ ID NO: 12181 - RNA, 20 nt, Artificial Sequence
  SAMD9L targeting guide sequence portion
cagcagcagacacagcuuuc

SEQ ID NO: 12182 - RNA, 20 nt, Artificial Sequence
  SAMD9L targeting guide sequence portion
cagcaggggaguuuaaaaga

SEQ ID NO: 12183 - RNA, 20 nt, Artificial Sequence
  SAMD9L targeting guide sequence portion
cagcuuucagaaagagggac

SEQ ID NO: 12184 - RNA, 20 nt, Artificial Sequence
  SAMD9L targeting guide sequence portion
caggaauauuuaguaguuuu

SEQ ID NO: 12185 - RNA, 20 nt, Artificial Sequence
  SAMD9L targeting guide sequence portion
caggaucucccaaguggcua

SEQ ID NO: 12186 - RNA, 20 nt, Artificial Sequence
  SAMD9L targeting guide sequence portion
caggccuaugaacaacuugg

SEQ ID NO: 12187 - RNA, 20 nt, Artificial Sequence
  SAMD9L targeting guide sequence portion
caggccuauguccccaggcc

SEQ ID NO: 12188 - RNA, 20 nt, Artificial Sequence
  SAMD9L targeting guide sequence portion
caggggaguuuaaaagaaau

SEQ ID NO: 12189 - RNA, 20 nt, Artificial Sequence
  SAMD9L targeting guide sequence portion
cagggucagcagcagacaca

SEQ ID NO: 12190 - RNA, 20 nt, Artificial Sequence
  SAMD9L targeting guide sequence portion
caggguucuucuggccuaua

SEQ ID NO: 12191 - RNA, 20 nt, Artificial Sequence
  SAMD9L targeting guide sequence portion
cagguaucuuagagagcuuc

SEQ ID NO: 12192 - RNA, 20 nt, Artificial Sequence
  SAMD9L targeting guide sequence portion
caguaacaggaucucccaag

SEQ ID NO: 12193 - RNA, 20 nt, Artificial Sequence
  SAMD9L targeting guide sequence portion
caguccaccaguccauacag

SEQ ID NO: 12194 - RNA, 20 nt, Artificial Sequence
  SAMD9L targeting guide sequence portion
caguccauacaguaacagga

SEQ ID NO: 12195 - RNA, 20 nt, Artificial Sequence
  SAMD9L targeting guide sequence portion
caguugccucccucuucugc

SEQ ID NO: 12196 - RNA, 20 nt, Artificial Sequence
  SAMD9L targeting guide sequence portion
cauaacuaaaggcuugaugu

SEQ ID NO: 12197 - RNA, 20 nt, Artificial Sequence
  SAMD9L targeting guide sequence portion
cauaauuaucuuuagaguua

SEQ ID NO: 12198 - RNA, 20 nt, Artificial Sequence
  SAMD9L targeting guide sequence portion
cauacaguaacaggaucucc

SEQ ID NO: 12199 - RNA, 20 nt, Artificial Sequence
  SAMD9L targeting guide sequence portion
cauagaaauauaggccagaa

SEQ ID NO: 12200 - RNA, 20 nt, Artificial Sequence
  SAMD9L targeting guide sequence portion
cauagacuucuugaugacaa

SEQ ID NO: 12201 - RNA, 20 nt, Artificial Sequence
  SAMD9L targeting guide sequence portion
cauaggccugauccuauuuc

SEQ ID NO: 12202 - RNA, 20 nt, Artificial Sequence
  SAMD9L targeting guide sequence portion
cauaggccuggggacauagg

SEQ ID NO: 12203 - RNA, 20 nt, Artificial Sequence
  SAMD9L targeting guide sequence portion
caucaagaagucuaugcucu

SEQ ID NO: 12204 - RNA, 20 nt, Artificial Sequence
  SAMD9L targeting guide sequence portion
caucaagccuuuaguuaugu

SEQ ID NO: 12205 - RNA, 20 nt, Artificial Sequence
  SAMD9L targeting guide sequence portion
caucuuuguaucucuuugua

SEQ ID NO: 12206 - RNA, 20 nt, Artificial Sequence
  SAMD9L targeting guide sequence portion
caugguccagaacauguccc

SEQ ID NO: 12207 - RNA, 20 nt, Artificial Sequence
  SAMD9L targeting guide sequence portion
caugucccucuuucugaaag

SEQ ID NO: 12208 - RNA, 20 nt, Artificial Sequence
  SAMD9L targeting guide sequence portion
caugugagcguugcccagau

SEQ ID NO: 12209 - RNA, 20 nt, Artificial Sequence
  SAMD9L targeting guide sequence portion
cauguucuggaccaugugag

SEQ ID NO: 12210 - RNA, 20 nt, Artificial Sequence
  SAMD9L targeting guide sequence portion
cauuauaacuuuuuucucua

SEQ ID NO: 12211 - RNA, 20 nt, Artificial Sequence
  SAMD9L targeting guide sequence portion
cauuuaguaagacauaacua

SEQ ID NO: 12212 - RNA, 20 nt, Artificial Sequence
  SAMD9L targeting guide sequence portion
ccaaacaguugccucccucu

SEQ ID NO: 12213 - RNA, 20 nt, Artificial Sequence
  SAMD9L targeting guide sequence portion
ccaaacccaauucuucuugu

SEQ ID NO: 12214 - RNA, 20 nt, Artificial Sequence
  SAMD9L targeting guide sequence portion
ccaaguggcuauacucccca

SEQ ID NO: 12215 - RNA, 20 nt, Artificial Sequence
  SAMD9L targeting guide sequence portion
ccaaguuguucauaggccug

SEQ ID NO: 12216 - RNA, 20 nt, Artificial Sequence
  SAMD9L targeting guide sequence portion
ccaauucuucuugucaucaa

SEQ ID NO: 12217 - RNA, 20 nt, Artificial Sequence
  SAMD9L targeting guide sequence portion
ccaccaccagguaucuuaga

SEQ ID NO: 12218 - RNA, 20 nt, Artificial Sequence
  SAMD9L targeting guide sequence portion
ccaccagguaucuuagagag

SEQ ID NO: 12219 - RNA, 20 nt, Artificial Sequence
  SAMD9L targeting guide sequence portion
ccaccaguccauacaguaac

SEQ ID NO: 12220 - RNA, 20 nt, Artificial Sequence
  SAMD9L targeting guide sequence portion
ccacuugggagauccuguua

SEQ ID NO: 12221 - RNA, 20 nt, Artificial Sequence
  SAMD9L targeting guide sequence portion
ccagaacaugucccucuuuc

SEQ ID NO: 12222 - RNA, 20 nt, Artificial Sequence
  SAMD9L targeting guide sequence portion
ccagaagaacccugauagag

SEQ ID NO: 12223 - RNA, 20 nt, Artificial Sequence
  SAMD9L targeting guide sequence portion
ccagaauaucuaaguuacau

SEQ ID NO: 12224 - RNA, 20 nt, Artificial Sequence
  SAMD9L targeting guide sequence portion
ccagauucauagaaauauag

SEQ ID NO: 12225 - RNA, 20 nt, Artificial Sequence
  SAMD9L targeting guide sequence portion
ccagcaggggaguuuaaaag

SEQ ID NO: 12226 - RNA, 20 nt, Artificial Sequence
  SAMD9L targeting guide sequence portion
ccaggccuaugaacaacuug

SEQ ID NO: 12227 - RNA, 20 nt, Artificial Sequence
  SAMD9L targeting guide sequence portion
ccagguaucuuagagagcuu

SEQ ID NO: 12228 - RNA, 20 nt, Artificial Sequence
  SAMD9L targeting guide sequence portion
ccaguccauacaguaacagg

SEQ ID NO: 12229 - RNA, 20 nt, Artificial Sequence
  SAMD9L targeting guide sequence portion
ccauaauuaucuuuagaguu

SEQ ID NO: 12230 - RNA, 20 nt, Artificial Sequence
  SAMD9L targeting guide sequence portion
ccauacaguaacaggaucuc

SEQ ID NO: 12231 - RNA, 20 nt, Artificial Sequence
  SAMD9L targeting guide sequence portion
ccaugugagcguugcccaga

SEQ ID NO: 12232 - RNA, 20 nt, Artificial Sequence
  SAMD9L targeting guide sequence portion
cccaaguggcuauacucccc

SEQ ID NO: 12233 - RNA, 20 nt, Artificial Sequence
  SAMD9L targeting guide sequence portion
cccaaguuguucauaggccu

SEQ ID NO: 12234 - RNA, 20 nt, Artificial Sequence
  SAMD9L targeting guide sequence portion
cccaauucuucuugucauca

SEQ ID NO: 12235 - RNA, 20 nt, Artificial Sequence
  SAMD9L targeting guide sequence portion
cccaccaccagguaucuuag

SEQ ID NO: 12236 - RNA, 20 nt, Artificial Sequence
  SAMD9L targeting guide sequence portion
cccagauucauagaaauaua

SEQ ID NO: 12237 - RNA, 20 nt, Artificial Sequence
  SAMD9L targeting guide sequence portion
cccaggccuaugaacaacuu

SEQ ID NO: 12238 - RNA, 20 nt, Artificial Sequence
  SAMD9L targeting guide sequence portion
ccccaaguuguucauaggcc

SEQ ID NO: 12239 - RNA, 20 nt, Artificial Sequence
  SAMD9L targeting guide sequence portion
ccccaccaccagguaucuua

SEQ ID NO: 12240 - RNA, 20 nt, Artificial Sequence
  SAMD9L targeting guide sequence portion
ccccaggccuaugaacaacu

SEQ ID NO: 12241 - RNA, 20 nt, Artificial Sequence
  SAMD9L targeting guide sequence portion
ccccugcuggacuauaacau

SEQ ID NO: 12242 - RNA, 20 nt, Artificial Sequence
  SAMD9L targeting guide sequence portion
cccucuucugcaguccacca

SEQ ID NO: 12243 - RNA, 20 nt, Artificial Sequence
  SAMD9L targeting guide sequence portion
cccucuuucugaaagcugug

SEQ ID NO: 12244 - RNA, 20 nt, Artificial Sequence
  SAMD9L targeting guide sequence portion
cccugauagagcauagacuu

SEQ ID NO: 12245 - RNA, 20 nt, Artificial Sequence
  SAMD9L targeting guide sequence portion
cccugcuccaaacaguugcc

SEQ ID NO: 12246 - RNA, 20 nt, Artificial Sequence
  SAMD9L targeting guide sequence portion
cccugcuggacuauaacauu

SEQ ID NO: 12247 - RNA, 20 nt, Artificial Sequence
  SAMD9L targeting guide sequence portion
ccuauauuucuaugaaucug

SEQ ID NO: 12248 - RNA, 20 nt, Artificial Sequence
  SAMD9L targeting guide sequence portion
ccuaugaacaacuuggggag

SEQ ID NO: 12249 - RNA, 20 nt, Artificial Sequence
  SAMD9L targeting guide sequence portion
ccuauguccccaggccuaug

SEQ ID NO: 12250 - RNA, 20 nt, Artificial Sequence
  SAMD9L targeting guide sequence portion
ccuauuucuuuuaaacuccc

SEQ ID NO: 12251 - RNA, 20 nt, Artificial Sequence
  SAMD9L targeting guide sequence portion
ccucccucuucugcagucca

SEQ ID NO: 12252 - RNA, 20 nt, Artificial Sequence
  SAMD9L targeting guide sequence portion
ccuccuuucauuauaacuuu

SEQ ID NO: 12253 - RNA, 20 nt, Artificial Sequence
  SAMD9L targeting guide sequence portion
ccucuucugcaguccaccag

SEQ ID NO: 12254 - RNA, 20 nt, Artificial Sequence
  SAMD9L targeting guide sequence portion
ccucuuucugaaagcugugu

SEQ ID NO: 12255 - RNA, 20 nt, Artificial Sequence
  SAMD9L targeting guide sequence portion
ccugauagagcauagacuuc

SEQ ID NO: 12256 - RNA, 20 nt, Artificial Sequence
  SAMD9L targeting guide sequence portion
ccugauccuauuucuuuuaa

SEQ ID NO: 12257 - RNA, 20 nt, Artificial Sequence
  SAMD9L targeting guide sequence portion
ccugcuaaccauaauuaucu

SEQ ID NO: 12258 - RNA, 20 nt, Artificial Sequence
  SAMD9L targeting guide sequence portion
ccugcuccaaacaguugccu

SEQ ID NO: 12259 - RNA, 20 nt, Artificial Sequence
  SAMD9L targeting guide sequence portion
ccugcuggacuauaacauuu

SEQ ID NO: 12260 - RNA, 20 nt, Artificial Sequence
  SAMD9L targeting guide sequence portion
ccuggggacauaggccugau

SEQ ID NO: 12261 - RNA, 20 nt, Artificial Sequence
  SAMD9L targeting guide sequence portion
ccuggugguggggucagaau

SEQ ID NO: 12262 - RNA, 20 nt, Artificial Sequence
  SAMD9L targeting guide sequence portion
ccuguuacuguauggacugg

SEQ ID NO: 12263 - RNA, 20 nt, Artificial Sequence
  SAMD9L targeting guide sequence portion
ccuucuccuuagcccccauu

SEQ ID NO: 12264 - RNA, 20 nt, Artificial Sequence
  SAMD9L targeting guide sequence portion
ccuuuaguuaugucuuacua

SEQ ID NO: 12265 - RNA, 20 nt, Artificial Sequence
  SAMD9L targeting guide sequence portion
ccuuucauuauaacuuuuuu

SEQ ID NO: 12266 - RNA, 20 nt, Artificial Sequence
  SAMD9L targeting guide sequence portion
cgcucacaugguccagaaca

SEQ ID NO: 12267 - RNA, 20 nt, Artificial Sequence
  SAMD9L targeting guide sequence portion
cguugcccagauucauagaa

SEQ ID NO: 12268 - RNA, 20 nt, Artificial Sequence
  SAMD9L targeting guide sequence portion
cuaaagauaauuaugguuag

SEQ ID NO: 12269 - RNA, 20 nt, Artificial Sequence
  SAMD9L targeting guide sequence portion
cuaaaggcuugauguagaga

SEQ ID NO: 12270 - RNA, 20 nt, Artificial Sequence
  SAMD9L targeting guide sequence portion
cuaaauauuccugcuaacca

SEQ ID NO: 12271 - RNA, 20 nt, Artificial Sequence
  SAMD9L targeting guide sequence portion
cuaaauguuauaguccagca

SEQ ID NO: 12272 - RNA, 20 nt, Artificial Sequence
  SAMD9L targeting guide sequence portion
cuaaccauaauuaucuuuag

SEQ ID NO: 12273 - RNA, 20 nt, Artificial Sequence
  SAMD9L targeting guide sequence portion
cuaagauaccuggugguggg

SEQ ID NO: 12274 - RNA, 20 nt, Artificial Sequence
  SAMD9L targeting guide sequence portion
cuaaggagaaggaagcucuc

SEQ ID NO: 12275 - RNA, 20 nt, Artificial Sequence
  SAMD9L targeting guide sequence portion
cuaaguuacauuacaaagag

SEQ ID NO: 12276 - RNA, 20 nt, Artificial Sequence
  SAMD9L targeting guide sequence portion
cuacaucaagccuuuaguua

SEQ ID NO: 12277 - RNA, 20 nt, Artificial Sequence
  SAMD9L targeting guide sequence portion
cuacuaaauauuccugcuaa

SEQ ID NO: 12278 - RNA, 20 nt, Artificial Sequence
  SAMD9L targeting guide sequence portion
cuauaacauuuaguaagaca

SEQ ID NO: 12279 - RNA, 20 nt, Artificial Sequence
  SAMD9L targeting guide sequence portion
cuauacuccccaaguuguuc

SEQ ID NO: 12280 - RNA, 20 nt, Artificial Sequence
  SAMD9L targeting guide sequence portion
cuauauuucuaugaaucugg

SEQ ID NO: 12281 - RNA, 20 nt, Artificial Sequence
  SAMD9L targeting guide sequence portion
cuaucaggguucuucuggcc

SEQ ID NO: 12282 - RNA, 20 nt, Artificial Sequence
  SAMD9L targeting guide sequence portion
cuaugaacaacuuggggagu

SEQ ID NO: 12283 - RNA, 20 nt, Artificial Sequence
  SAMD9L targeting guide sequence portion
cuaugaaucugggcaacgcu

SEQ ID NO: 12284 - RNA, 20 nt, Artificial Sequence
  SAMD9L targeting guide sequence portion
cuaugcucuaucaggguucu

SEQ ID NO: 12285 - RNA, 20 nt, Artificial Sequence
  SAMD9L targeting guide sequence portion
cuauguccccaggccuauga

SEQ ID NO: 12286 - RNA, 20 nt, Artificial Sequence
  SAMD9L targeting guide sequence portion
cuauuucuuuuaaacucccc

SEQ ID NO: 12287 - RNA, 20 nt, Artificial Sequence
  SAMD9L targeting guide sequence portion
cucacaugguccagaacaug

SEQ ID NO: 12288 - RNA, 20 nt, Artificial Sequence
  SAMD9L targeting guide sequence portion
cuccaaacaguugccucccu

SEQ ID NO: 12289 - RNA, 20 nt, Artificial Sequence
  SAMD9L targeting guide sequence portion
cuccaaacccaauucuucuu

SEQ ID NO: 12290 - RNA, 20 nt, Artificial Sequence
  SAMD9L targeting guide sequence portion
cucccaaguggcuauacucc

SEQ ID NO: 12291 - RNA, 20 nt, Artificial Sequence
  SAMD9L targeting guide sequence portion
cuccccaaguuguucauagg

SEQ ID NO: 12292 - RNA, 20 nt, Artificial Sequence
  SAMD9L targeting guide sequence portion
cuccccugcuggacuauaac

SEQ ID NO: 12293 - RNA, 20 nt, Artificial Sequence
  SAMD9L targeting guide sequence portion
cucccucuucugcaguccac

SEQ ID NO: 12294 - RNA, 20 nt, Artificial Sequence
  SAMD9L targeting guide sequence portion
cuccuuucauuauaacuuuu

SEQ ID NO: 12295 - RNA, 20 nt, Artificial Sequence
  SAMD9L targeting guide sequence portion
cucuaaagauaauuaugguu

SEQ ID NO: 12296 - RNA, 20 nt, Artificial Sequence
  SAMD9L targeting guide sequence portion
cucuaagauaccugguggug

SEQ ID NO: 12297 - RNA, 20 nt, Artificial Sequence
  SAMD9L targeting guide sequence portion
cucuacaucaagccuuuagu

SEQ ID NO: 12298 - RNA, 20 nt, Artificial Sequence
  SAMD9L targeting guide sequence portion
cucuaucaggguucuucugg

SEQ ID NO: 12299 - RNA, 20 nt, Artificial Sequence
  SAMD9L targeting guide sequence portion
cucucuaagauaccuggugg

SEQ ID NO: 12300 - RNA, 20 nt, Artificial Sequence
  SAMD9L targeting guide sequence portion
cucuucugcaguccaccagu

SEQ ID NO: 12301 - RNA, 20 nt, Artificial Sequence
  SAMD9L targeting guide sequence portion
cucuuucugaaagcuguguc

SEQ ID NO: 12302 - RNA, 20 nt, Artificial Sequence
  SAMD9L targeting guide sequence portion
cucuuuguaauguaacuuag

SEQ ID NO: 12303 - RNA, 20 nt, Artificial Sequence
  SAMD9L targeting guide sequence portion
cugaaagcugugucugcugc

SEQ ID NO: 12304 - RNA, 20 nt, Artificial Sequence
  SAMD9L targeting guide sequence portion
cugaccccaccaccagguau

SEQ ID NO: 12305 - RNA, 20 nt, Artificial Sequence
  SAMD9L targeting guide sequence portion
cugacccugcuccaaacagu

SEQ ID NO: 12306 - RNA, 20 nt, Artificial Sequence
  SAMD9L targeting guide sequence portion
cugauagagcauagacuucu

SEQ ID NO: 12307 - RNA, 20 nt, Artificial Sequence
  SAMD9L targeting guide sequence portion
cugauccuauuucuuuuaaa

SEQ ID NO: 12308 - RNA, 20 nt, Artificial Sequence
  SAMD9L targeting guide sequence portion
cugcagaagagggaggcaac

SEQ ID NO: 12309 - RNA, 20 nt, Artificial Sequence
  SAMD9L targeting guide sequence portion
cugcaguccaccaguccaua

SEQ ID NO: 12310 - RNA, 20 nt, Artificial Sequence
  SAMD9L targeting guide sequence portion
cugcuaaccauaauuaucuu

SEQ ID NO: 12311 - RNA, 20 nt, Artificial Sequence
  SAMD9L targeting guide sequence portion
cugcuccaaacaguugccuc

SEQ ID NO: 12312 - RNA, 20 nt, Artificial Sequence
  SAMD9L targeting guide sequence portion
cugcugacccugcuccaaac

SEQ ID NO: 12313 - RNA, 20 nt, Artificial Sequence
  SAMD9L targeting guide sequence portion
cugcugcugacccugcucca

SEQ ID NO: 12314 - RNA, 20 nt, Artificial Sequence
  SAMD9L targeting guide sequence portion
cugcuggacuauaacauuua

SEQ ID NO: 12315 - RNA, 20 nt, Artificial Sequence
  SAMD9L targeting guide sequence portion
cuggaccaugugagcguugc

SEQ ID NO: 12316 - RNA, 20 nt, Artificial Sequence
  SAMD9L targeting guide sequence portion
cuggacuauaacauuuagua

SEQ ID NO: 12317 - RNA, 20 nt, Artificial Sequence
  SAMD9L targeting guide sequence portion
cuggacuccaaacccaauuc

SEQ ID NO: 12318 - RNA, 20 nt, Artificial Sequence
  SAMD9L targeting guide sequence portion
cuggccuauauuucuaugaa

SEQ ID NO: 12319 - RNA, 20 nt, Artificial Sequence
  SAMD9L targeting guide sequence portion
cugggcaacgcucacauggu

SEQ ID NO: 12320 - RNA, 20 nt, Artificial Sequence
  SAMD9L targeting guide sequence portion
cuggggacauaggccugauc

SEQ ID NO: 12321 - RNA, 20 nt, Artificial Sequence
  SAMD9L targeting guide sequence portion
cugguggacugcagaagagg

SEQ ID NO: 12322 - RNA, 20 nt, Artificial Sequence
  SAMD9L targeting guide sequence portion
cuggugguggggucagaauu

SEQ ID NO: 12323 - RNA, 20 nt, Artificial Sequence
  SAMD9L targeting guide sequence portion
cuguauggacugguggacug

SEQ ID NO: 12324 - RNA, 20 nt, Artificial Sequence
  SAMD9L targeting guide sequence portion
cugugucugcugcugacccu

SEQ ID NO: 12325 - RNA, 20 nt, Artificial Sequence
  SAMD9L targeting guide sequence portion
cuguuacuguauggacuggu

SEQ ID NO: 12326 - RNA, 20 nt, Artificial Sequence
  SAMD9L targeting guide sequence portion
cuguugaaaugggggcuaag

SEQ ID NO: 12327 - RNA, 20 nt, Artificial Sequence
  SAMD9L targeting guide sequence portion
cuguuuggagcagggucagc

SEQ ID NO: 12328 - RNA, 20 nt, Artificial Sequence
  SAMD9L targeting guide sequence portion
cuuacuaaauguuauagucc

SEQ ID NO: 12329 - RNA, 20 nt, Artificial Sequence
  SAMD9L targeting guide sequence portion
cuuagagagcuuccuucucc

SEQ ID NO: 12330 - RNA, 20 nt, Artificial Sequence
  SAMD9L targeting guide sequence portion
cuuagauauucuggacucca

SEQ ID NO: 12331 - RNA, 20 nt, Artificial Sequence
  SAMD9L targeting guide sequence portion
cuuccuucuccuuagccccc

SEQ ID NO: 12332 - RNA, 20 nt, Artificial Sequence
  SAMD9L targeting guide sequence portion
cuucuccuuagcccccauuu

SEQ ID NO: 12333 - RNA, 20 nt, Artificial Sequence
  SAMD9L targeting guide sequence portion
cuucugcaguccaccagucc

SEQ ID NO: 12334 - RNA, 20 nt, Artificial Sequence
  SAMD9L targeting guide sequence portion
cuucuggccuauauuucuau

SEQ ID NO: 12335 - RNA, 20 nt, Artificial Sequence
  SAMD9L targeting guide sequence portion
cuucuugaugacaagaagaa

SEQ ID NO: 12336 - RNA, 20 nt, Artificial Sequence
  SAMD9L targeting guide sequence portion
cuucuugucaucaagaaguc

SEQ ID NO: 12337 - RNA, 20 nt, Artificial Sequence
  SAMD9L targeting guide sequence portion
cuugaugacaagaagaauug

SEQ ID NO: 12338 - RNA, 20 nt, Artificial Sequence
  SAMD9L targeting guide sequence portion
cuugauguagagaaaaaagu

SEQ ID NO: 12339 - RNA, 20 nt, Artificial Sequence
  SAMD9L targeting guide sequence portion
cuugggagauccuguuacug

SEQ ID NO: 12340 - RNA, 20 nt, Artificial Sequence
  SAMD9L targeting guide sequence portion
cuuggggaguauagccacuu

SEQ ID NO: 12341 - RNA, 20 nt, Artificial Sequence
  SAMD9L targeting guide sequence portion
cuugucaucaagaagucuau

SEQ ID NO: 12342 - RNA, 20 nt, Artificial Sequence
  SAMD9L targeting guide sequence portion
cuuuagaguuaauaauucug

SEQ ID NO: 12343 - RNA, 20 nt, Artificial Sequence
  SAMD9L targeting guide sequence portion
cuuuaguuaugucuuacuaa

SEQ ID NO: 12344 - RNA, 20 nt, Artificial Sequence
  SAMD9L targeting guide sequence portion
cuuucagaaagagggacaug

SEQ ID NO: 12345 - RNA, 20 nt, Artificial Sequence
  SAMD9L targeting guide sequence portion
cuuucauuauaacuuuuuuc

SEQ ID NO: 12346 - RNA, 20 nt, Artificial Sequence
  SAMD9L targeting guide sequence portion
cuuucugaaagcugugucug

SEQ ID NO: 12347 - RNA, 20 nt, Artificial Sequence
  SAMD9L targeting guide sequence portion
cuuuguaauguaacuuagau

SEQ ID NO: 12348 - RNA, 20 nt, Artificial Sequence
  SAMD9L targeting guide sequence portion
cuuuguaucucuuuguaaug

SEQ ID NO: 12349 - RNA, 20 nt, Artificial Sequence
  SAMD9L targeting guide sequence portion
cuuuuaaacuccccugcugg

SEQ ID NO: 12350 - RNA, 20 nt, Artificial Sequence
  SAMD9L targeting guide sequence portion
cuuuuuucucuacaucaagc

SEQ ID NO: 12351 - RNA, 20 nt, Artificial Sequence
  SAMD9L targeting guide sequence portion
gaaaaaaguuauaaugaaag

SEQ ID NO: 12352 - RNA, 20 nt, Artificial Sequence
  SAMD9L targeting guide sequence portion
gaaaaacuacuaaauauucc

SEQ ID NO: 12353 - RNA, 20 nt, Artificial Sequence
  SAMD9L targeting guide sequence portion
gaaagagggacauguucugg

SEQ ID NO: 12354 - RNA, 20 nt, Artificial Sequence
  SAMD9L targeting guide sequence portion
gaaagcugugucugcugcug

SEQ ID NO: 12355 - RNA, 20 nt, Artificial Sequence
  SAMD9L targeting guide sequence portion
gaaaggaggaaaaacuacua

SEQ ID NO: 12356 - RNA, 20 nt, Artificial Sequence
  SAMD9L targeting guide sequence portion
gaaauaggaucaggccuaug

SEQ ID NO: 12357 - RNA, 20 nt, Artificial Sequence
  SAMD9L targeting guide sequence portion
gaaauauaggccagaagaac

SEQ ID NO: 12358 - RNA, 20 nt, Artificial Sequence
  SAMD9L targeting guide sequence portion
gaaaugggggcuaaggagaa

SEQ ID NO: 12359 - RNA, 20 nt, Artificial Sequence
  SAMD9L targeting guide sequence portion
gaacaacuuggggaguauag

SEQ ID NO: 12360 - RNA, 20 nt, Artificial Sequence
  SAMD9L targeting guide sequence portion
gaacaugucccucuuucuga

SEQ ID NO: 12361 - RNA, 20 nt, Artificial Sequence
  SAMD9L targeting guide sequence portion
gaacccugauagagcauaga

SEQ ID NO: 12362 - RNA, 20 nt, Artificial Sequence
  SAMD9L targeting guide sequence portion
gaagaacccugauagagcau

SEQ ID NO: 12363 - RNA, 20 nt, Artificial Sequence
  SAMD9L targeting guide sequence portion
gaagaauuggguuuggaguc

SEQ ID NO: 12364 - RNA, 20 nt, Artificial Sequence
  SAMD9L targeting guide sequence portion
gaagagggaggcaacuguuu

SEQ ID NO: 12365 - RNA, 20 nt, Artificial Sequence
  SAMD9L targeting guide sequence portion
gaagcucucuaagauaccug

SEQ ID NO: 12366 - RNA, 20 nt, Artificial Sequence
  SAMD9L targeting guide sequence portion
gaaggaagcucucuaagaua

SEQ ID NO: 12367 - RNA, 20 nt, Artificial Sequence
  SAMD9L targeting guide sequence portion
gaagucuaugcucuaucagg

SEQ ID NO: 12368 - RNA, 20 nt, Artificial Sequence
  SAMD9L targeting guide sequence portion
gaauaucuaaguuacauuac

SEQ ID NO: 12369 - RNA, 20 nt, Artificial Sequence
  SAMD9L targeting guide sequence portion
gaauauuuaguaguuuuucc

SEQ ID NO: 12370 - RNA, 20 nt, Artificial Sequence
  SAMD9L targeting guide sequence portion
gaaucugggcaacgcucaca

SEQ ID NO: 12371 - RNA, 20 nt, Artificial Sequence
  SAMD9L targeting guide sequence portion
gaauuauuaacucuaaagau

SEQ ID NO: 12372 - RNA, 20 nt, Artificial Sequence
  SAMD9L targeting guide sequence portion
gaauuggguuuggaguccag

SEQ ID NO: 12373 - RNA, 20 nt, Artificial Sequence
  SAMD9L targeting guide sequence portion
gacaagaagaauuggguuug

SEQ ID NO: 12374 - RNA, 20 nt, Artificial Sequence
  SAMD9L targeting guide sequence portion
gacacagcuuucagaaagag

SEQ ID NO: 12375 - RNA, 20 nt, Artificial Sequence
  SAMD9L targeting guide sequence portion
gacauaacuaaaggcuugau

SEQ ID NO: 12376 - RNA, 20 nt, Artificial Sequence
  SAMD9L targeting guide sequence portion
gacauaggccugauccuauu

SEQ ID NO: 12377 - RNA, 20 nt, Artificial Sequence
  SAMD9L targeting guide sequence portion
gacauguucuggaccaugug

SEQ ID NO: 12378 - RNA, 20 nt, Artificial Sequence
  SAMD9L targeting guide sequence portion
gaccaugugagcguugccca

SEQ ID NO: 12379 - RNA, 20 nt, Artificial Sequence
  SAMD9L targeting guide sequence portion
gaccccaccaccagguaucu

SEQ ID NO: 12380 - RNA, 20 nt, Artificial Sequence
  SAMD9L targeting guide sequence portion
gacccugcuccaaacaguug

SEQ ID NO: 12381 - RNA, 20 nt, Artificial Sequence
  SAMD9L targeting guide sequence portion
gacuauaacauuuaguaaga

SEQ ID NO: 12382 - RNA, 20 nt, Artificial Sequence
  SAMD9L targeting guide sequence portion
gacuccaaacccaauucuuc

SEQ ID NO: 12383 - RNA, 20 nt, Artificial Sequence
  SAMD9L targeting guide sequence portion
gacugcagaagagggaggca

SEQ ID NO: 12384 - RNA, 20 nt, Artificial Sequence
  SAMD9L targeting guide sequence portion
gacugguggacugcagaaga

SEQ ID NO: 12385 - RNA, 20 nt, Artificial Sequence
  SAMD9L targeting guide sequence portion
gacuucuugaugacaagaag

SEQ ID NO: 12386 - RNA, 20 nt, Artificial Sequence
  SAMD9L targeting guide sequence portion
gagaaaaaaguuauaaugaa

SEQ ID NO: 12387 - RNA, 20 nt, Artificial Sequence
  SAMD9L targeting guide sequence portion
gagaaggaagcucucuaaga

SEQ ID NO: 12388 - RNA, 20 nt, Artificial Sequence
  SAMD9L targeting guide sequence portion
gagagcuuccuucuccuuag

SEQ ID NO: 12389 - RNA, 20 nt, Artificial Sequence
  SAMD9L targeting guide sequence portion
gagauccuguuacuguaugg

SEQ ID NO: 12390 - RNA, 20 nt, Artificial Sequence
  SAMD9L targeting guide sequence portion
gagcagggucagcagcagac

SEQ ID NO: 12391 - RNA, 20 nt, Artificial Sequence
  SAMD9L targeting guide sequence portion
gagcauagacuucuugauga

SEQ ID NO: 12392 - RNA, 20 nt, Artificial Sequence
  SAMD9L targeting guide sequence portion
gagcguugcccagauucaua

SEQ ID NO: 12393 - RNA, 20 nt, Artificial Sequence
  SAMD9L targeting guide sequence portion
gagcuuccuucuccuuagcc

SEQ ID NO: 12394 - RNA, 20 nt, Artificial Sequence
  SAMD9L targeting guide sequence portion
gaggaaaaacuacuaaauau

SEQ ID NO: 12395 - RNA, 20 nt, Artificial Sequence
  SAMD9L targeting guide sequence portion
gaggcaacuguuuggagcag

SEQ ID NO: 12396 - RNA, 20 nt, Artificial Sequence
  SAMD9L targeting guide sequence portion
gagggacauguucuggacca

SEQ ID NO: 12397 - RNA, 20 nt, Artificial Sequence
  SAMD9L targeting guide sequence portion
gagggaggcaacuguuugga

SEQ ID NO: 12398 - RNA, 20 nt, Artificial Sequence
  SAMD9L targeting guide sequence portion
gaguauagccacuugggaga

SEQ ID NO: 12399 - RNA, 20 nt, Artificial Sequence
  SAMD9L targeting guide sequence portion
gaguccagaauaucuaaguu

SEQ ID NO: 12400 - RNA, 20 nt, Artificial Sequence
  SAMD9L targeting guide sequence portion
gaguuaauaauucugacccc

SEQ ID NO: 12401 - RNA, 20 nt, Artificial Sequence
  SAMD9L targeting guide sequence portion
gaguuuaaaagaaauaggau

SEQ ID NO: 12402 - RNA, 20 nt, Artificial Sequence
  SAMD9L targeting guide sequence portion
gauaauuaugguuagcagga

SEQ ID NO: 12403 - RNA, 20 nt, Artificial Sequence
  SAMD9L targeting guide sequence portion
gauaccugguggugggguca

SEQ ID NO: 12404 - RNA, 20 nt, Artificial Sequence
  SAMD9L targeting guide sequence portion
gauagagcauagacuucuug

SEQ ID NO: 12405 - RNA, 20 nt, Artificial Sequence
  SAMD9L targeting guide sequence portion
gauauucuggacuccaaacc

SEQ ID NO: 12406 - RNA, 20 nt, Artificial Sequence
  SAMD9L targeting guide sequence portion
gaucaggccuauguccccag

SEQ ID NO: 12407 - RNA, 20 nt, Artificial Sequence
  SAMD9L targeting guide sequence portion
gauccuauuucuuuuaaacu

SEQ ID NO: 12408 - RNA, 20 nt, Artificial Sequence
  SAMD9L targeting guide sequence portion
gauccuguuacuguauggac

SEQ ID NO: 12409 - RNA, 20 nt, Artificial Sequence
  SAMD9L targeting guide sequence portion
gaucucccaaguggcuauac

SEQ ID NO: 12410 - RNA, 20 nt, Artificial Sequence
  SAMD9L targeting guide sequence portion
gaugacaagaagaauugggu

SEQ ID NO: 12411 - RNA, 20 nt, Artificial Sequence
  SAMD9L targeting guide sequence portion
gauguagagaaaaaaguuau

SEQ ID NO: 12412 - RNA, 20 nt, Artificial Sequence
  SAMD9L targeting guide sequence portion
gauucauagaaauauaggcc

SEQ ID NO: 12413 - RNA, 20 nt, Artificial Sequence
  SAMD9L targeting guide sequence portion
gcaacgcucacaugguccag

SEQ ID NO: 12414 - RNA, 20 nt, Artificial Sequence
  SAMD9L targeting guide sequence portion
gcaacuguuuggagcagggu

SEQ ID NO: 12415 - RNA, 20 nt, Artificial Sequence
  SAMD9L targeting guide sequence portion
gcagaagagggaggcaacug

SEQ ID NO: 12416 - RNA, 20 nt, Artificial Sequence
  SAMD9L targeting guide sequence portion
gcagacacagcuuucagaaa

SEQ ID NO: 12417 - RNA, 20 nt, Artificial Sequence
  SAMD9L targeting guide sequence portion
gcagcagacacagcuuucag

SEQ ID NO: 12418 - RNA, 20 nt, Artificial Sequence
  SAMD9L targeting guide sequence portion
gcaggaauauuuaguaguuu

SEQ ID NO: 12419 - RNA, 20 nt, Artificial Sequence
  SAMD9L targeting guide sequence portion
gcaggggaguuuaaaagaaa

SEQ ID NO: 12420 - RNA, 20 nt, Artificial Sequence
  SAMD9L targeting guide sequence portion
gcagggucagcagcagacac

SEQ ID NO: 12421 - RNA, 20 nt, Artificial Sequence
  SAMD9L targeting guide sequence portion
gcaguccaccaguccauaca

SEQ ID NO: 12422 - RNA, 20 nt, Artificial Sequence
  SAMD9L targeting guide sequence portion
gcauagacuucuugaugaca

SEQ ID NO: 12423 - RNA, 20 nt, Artificial Sequence
  SAMD9L targeting guide sequence portion
gccacuugggagauccuguu

SEQ ID NO: 12424 - RNA, 20 nt, Artificial Sequence
  SAMD9L targeting guide sequence portion
gccagaagaacccugauaga

SEQ ID NO: 12425 - RNA, 20 nt, Artificial Sequence
  SAMD9L targeting guide sequence portion
gcccagauucauagaaauau

SEQ ID NO: 12426 - RNA, 20 nt, Artificial Sequence
  SAMD9L targeting guide sequence portion
gccuauauuucuaugaaucu

SEQ ID NO: 12427 - RNA, 20 nt, Artificial Sequence
  SAMD9L targeting guide sequence portion
gccuaugaacaacuugggga

SEQ ID NO: 12428 - RNA, 20 nt, Artificial Sequence
  SAMD9L targeting guide sequence portion
gccuauguccccaggccuau

SEQ ID NO: 12429 - RNA, 20 nt, Artificial Sequence
  SAMD9L targeting guide sequence portion
gccucccucuucugcagucc

SEQ ID NO: 12430 - RNA, 20 nt, Artificial Sequence
  SAMD9L targeting guide sequence portion
gccugauccuauuucuuuua

SEQ ID NO: 12431 - RNA, 20 nt, Artificial Sequence
  SAMD9L targeting guide sequence portion
gccuggggacauaggccuga

SEQ ID NO: 12432 - RNA, 20 nt, Artificial Sequence
  SAMD9L targeting guide sequence portion
gccuuuaguuaugucuuacu

SEQ ID NO: 12433 - RNA, 20 nt, Artificial Sequence
  SAMD9L targeting guide sequence portion
gcguugcccagauucauaga

SEQ ID NO: 12434 - RNA, 20 nt, Artificial Sequence
  SAMD9L targeting guide sequence portion
gcuaaccauaauuaucuuua

SEQ ID NO: 12435 - RNA, 20 nt, Artificial Sequence
  SAMD9L targeting guide sequence portion
gcuaaggagaaggaagcucu

SEQ ID NO: 12436 - RNA, 20 nt, Artificial Sequence
  SAMD9L targeting guide sequence portion
gcuauacuccccaaguuguu

SEQ ID NO: 12437 - RNA, 20 nt, Artificial Sequence
  SAMD9L targeting guide sequence portion
gcucacaugguccagaacau

SEQ ID NO: 12438 - RNA, 20 nt, Artificial Sequence
  SAMD9L targeting guide sequence portion
gcuccaaacaguugccuccc

SEQ ID NO: 12439 - RNA, 20 nt, Artificial Sequence
  SAMD9L targeting guide sequence portion
gcucuaucaggguucuucug

SEQ ID NO: 12440 - RNA, 20 nt, Artificial Sequence
  SAMD9L targeting guide sequence portion
gcucucuaagauaccuggug

SEQ ID NO: 12441 - RNA, 20 nt, Artificial Sequence
  SAMD9L targeting guide sequence portion
gcugacccugcuccaaacag

SEQ ID NO: 12442 - RNA, 20 nt, Artificial Sequence
  SAMD9L targeting guide sequence portion
gcugcugacccugcuccaaa

SEQ ID NO: 12443 - RNA, 20 nt, Artificial Sequence
  SAMD9L targeting guide sequence portion
gcuggacuauaacauuuagu

SEQ ID NO: 12444 - RNA, 20 nt, Artificial Sequence
  SAMD9L targeting guide sequence portion
gcugugucugcugcugaccc

SEQ ID NO: 12445 - RNA, 20 nt, Artificial Sequence
  SAMD9L targeting guide sequence portion
gcuguugaaaugggggcuaa

SEQ ID NO: 12446 - RNA, 20 nt, Artificial Sequence
  SAMD9L targeting guide sequence portion
gcuuccuucuccuuagcccc

SEQ ID NO: 12447 - RNA, 20 nt, Artificial Sequence
  SAMD9L targeting guide sequence portion
gcuugauguagagaaaaaag

SEQ ID NO: 12448 - RNA, 20 nt, Artificial Sequence
  SAMD9L targeting guide sequence portion
gcuuucagaaagagggacau

SEQ ID NO: 12449 - RNA, 20 nt, Artificial Sequence
  SAMD9L targeting guide sequence portion
ggaaaaacuacuaaauauuc

SEQ ID NO: 12450 - RNA, 20 nt, Artificial Sequence
  SAMD9L targeting guide sequence portion
ggaagcucucuaagauaccu

SEQ ID NO: 12451 - RNA, 20 nt, Artificial Sequence
  SAMD9L targeting guide sequence portion
ggaauauuuaguaguuuuuc

SEQ ID NO: 12452 - RNA, 20 nt, Artificial Sequence
  SAMD9L targeting guide sequence portion
ggacauaggccugauccuau

SEQ ID NO: 12453 - RNA, 20 nt, Artificial Sequence
  SAMD9L targeting guide sequence portion
ggacauguucuggaccaugu

SEQ ID NO: 12454 - RNA, 20 nt, Artificial Sequence
  SAMD9L targeting guide sequence portion
ggaccaugugagcguugccc

SEQ ID NO: 12455 - RNA, 20 nt, Artificial Sequence
  SAMD9L targeting guide sequence portion
ggacuauaacauuuaguaag

SEQ ID NO: 12456 - RNA, 20 nt, Artificial Sequence
  SAMD9L targeting guide sequence portion
ggacuccaaacccaauucuu

SEQ ID NO: 12457 - RNA, 20 nt, Artificial Sequence
  SAMD9L targeting guide sequence portion
ggacugcagaagagggaggc

SEQ ID NO: 12458 - RNA, 20 nt, Artificial Sequence
  SAMD9L targeting guide sequence portion
ggacugguggacugcagaag

SEQ ID NO: 12459 - RNA, 20 nt, Artificial Sequence
  SAMD9L targeting guide sequence portion
ggagaaggaagcucucuaag

SEQ ID NO: 12460 - RNA, 20 nt, Artificial Sequence
  SAMD9L targeting guide sequence portion
ggagauccuguuacuguaug

SEQ ID NO: 12461 - RNA, 20 nt, Artificial Sequence
  SAMD9L targeting guide sequence portion
ggagcagggucagcagcaga

SEQ ID NO: 12462 - RNA, 20 nt, Artificial Sequence
  SAMD9L targeting guide sequence portion
ggaggaaaaacuacuaaaua

SEQ ID NO: 12463 - RNA, 20 nt, Artificial Sequence
  SAMD9L targeting guide sequence portion
ggaggcaacuguuuggagca

SEQ ID NO: 12464 - RNA, 20 nt, Artificial Sequence
  SAMD9L targeting guide sequence portion
ggaguauagccacuugggag

SEQ ID NO: 12465 - RNA, 20 nt, Artificial Sequence
  SAMD9L targeting guide sequence portion
ggaguccagaauaucuaagu

SEQ ID NO: 12466 - RNA, 20 nt, Artificial Sequence
  SAMD9L targeting guide sequence portion
ggaguuuaaaagaaauagga

SEQ ID NO: 12467 - RNA, 20 nt, Artificial Sequence
  SAMD9L targeting guide sequence portion
ggaucaggccuaugucccca

SEQ ID NO: 12468 - RNA, 20 nt, Artificial Sequence
  SAMD9L targeting guide sequence portion
ggaucucccaaguggcuaua

SEQ ID NO: 12469 - RNA, 20 nt, Artificial Sequence
  SAMD9L targeting guide sequence portion
ggcaacgcucacauggucca

SEQ ID NO: 12470 - RNA, 20 nt, Artificial Sequence
  SAMD9L targeting guide sequence portion
ggcaacuguuuggagcaggg

SEQ ID NO: 12471 - RNA, 20 nt, Artificial Sequence
  SAMD9L targeting guide sequence portion
ggccagaagaacccugauag

SEQ ID NO: 12472 - RNA, 20 nt, Artificial Sequence
  SAMD9L targeting guide sequence portion
ggccuauauuucuaugaauc

SEQ ID NO: 12473 - RNA, 20 nt, Artificial Sequence
  SAMD9L targeting guide sequence portion
ggccuaugaacaacuugggg

SEQ ID NO: 12474 - RNA, 20 nt, Artificial Sequence
  SAMD9L targeting guide sequence portion
ggccuauguccccaggccua

SEQ ID NO: 12475 - RNA, 20 nt, Artificial Sequence
  SAMD9L targeting guide sequence portion
ggccugauccuauuucuuuu

SEQ ID NO: 12476 - RNA, 20 nt, Artificial Sequence
  SAMD9L targeting guide sequence portion
ggccuggggacauaggccug

SEQ ID NO: 12477 - RNA, 20 nt, Artificial Sequence
  SAMD9L targeting guide sequence portion
ggcuaaggagaaggaagcuc

SEQ ID NO: 12478 - RNA, 20 nt, Artificial Sequence
  SAMD9L targeting guide sequence portion
ggcuauacuccccaaguugu

SEQ ID NO: 12479 - RNA, 20 nt, Artificial Sequence
  SAMD9L targeting guide sequence portion
ggcuguugaaaugggggcua

SEQ ID NO: 12480 - RNA, 20 nt, Artificial Sequence
  SAMD9L targeting guide sequence portion
ggcuugauguagagaaaaaa

SEQ ID NO: 12481 - RNA, 20 nt, Artificial Sequence
  SAMD9L targeting guide sequence portion
gggacauaggccugauccua

SEQ ID NO: 12482 - RNA, 20 nt, Artificial Sequence
  SAMD9L targeting guide sequence portion
gggacauguucuggaccaug

SEQ ID NO: 12483 - RNA, 20 nt, Artificial Sequence
  SAMD9L targeting guide sequence portion
gggagauccuguuacuguau

SEQ ID NO: 12484 - RNA, 20 nt, Artificial Sequence
  SAMD9L targeting guide sequence portion
gggaggcaacuguuuggagc

SEQ ID NO: 12485 - RNA, 20 nt, Artificial Sequence
  SAMD9L targeting guide sequence portion
gggaguauagccacuuggga

SEQ ID NO: 12486 - RNA, 20 nt, Artificial Sequence
  SAMD9L targeting guide sequence portion
gggaguuuaaaagaaauagg

SEQ ID NO: 12487 - RNA, 20 nt, Artificial Sequence
  SAMD9L targeting guide sequence portion
gggcaacgcucacauggucc

SEQ ID NO: 12488 - RNA, 20 nt, Artificial Sequence
  SAMD9L targeting guide sequence portion
gggcuaaggagaaggaagcu

SEQ ID NO: 12489 - RNA, 20 nt, Artificial Sequence
  SAMD9L targeting guide sequence portion
ggggacauaggccugauccu

SEQ ID NO: 12490 - RNA, 20 nt, Artificial Sequence
  SAMD9L targeting guide sequence portion
ggggaguauagccacuuggg

SEQ ID NO: 12491 - RNA, 20 nt, Artificial Sequence
  SAMD9L targeting guide sequence portion
ggggaguuuaaaagaaauag

SEQ ID NO: 12492 - RNA, 20 nt, Artificial Sequence
  SAMD9L targeting guide sequence portion
ggggcuaaggagaaggaagc

SEQ ID NO: 12493 - RNA, 20 nt, Artificial Sequence
  SAMD9L targeting guide sequence portion
gggggcuaaggagaaggaag

SEQ ID NO: 12494 - RNA, 20 nt, Artificial Sequence
  SAMD9L targeting guide sequence portion
ggggucagaauuauuaacuc

SEQ ID NO: 12495 - RNA, 20 nt, Artificial Sequence
  SAMD9L targeting guide sequence portion
gggucagaauuauuaacucu

SEQ ID NO: 12496 - RNA, 20 nt, Artificial Sequence
  SAMD9L targeting guide sequence portion
gggucagcagcagacacagc

SEQ ID NO: 12497 - RNA, 20 nt, Artificial Sequence
  SAMD9L targeting guide sequence portion
ggguucuucuggccuauauu

SEQ ID NO: 12498 - RNA, 20 nt, Artificial Sequence
  SAMD9L targeting guide sequence portion
ggguuuggaguccagaauau

SEQ ID NO: 12499 - RNA, 20 nt, Artificial Sequence
  SAMD9L targeting guide sequence portion
gguaucuuagagagcuuccu

SEQ ID NO: 12500 - RNA, 20 nt, Artificial Sequence
  SAMD9L targeting guide sequence portion
ggucagaauuauuaacucua

SEQ ID NO: 12501 - RNA, 20 nt, Artificial Sequence
  SAMD9L targeting guide sequence portion
ggucagcagcagacacagcu

SEQ ID NO: 12502 - RNA, 20 nt, Artificial Sequence
  SAMD9L targeting guide sequence portion
gguccagaacaugucccucu

SEQ ID NO: 12503 - RNA, 20 nt, Artificial Sequence
  SAMD9L targeting guide sequence portion
gguggacugcagaagaggga

SEQ ID NO: 12504 - RNA, 20 nt, Artificial Sequence
  SAMD9L targeting guide sequence portion
gguggggucagaauuauuaa

SEQ ID NO: 12505 - RNA, 20 nt, Artificial Sequence
  SAMD9L targeting guide sequence portion
ggugguggggucagaauuau

SEQ ID NO: 12506 - RNA, 20 nt, Artificial Sequence
  SAMD9L targeting guide sequence portion
gguuagcaggaauauuuagu

SEQ ID NO: 12507 - RNA, 20 nt, Artificial Sequence
  SAMD9L targeting guide sequence portion
gguucuucuggccuauauuu

SEQ ID NO: 12508 - RNA, 20 nt, Artificial Sequence
  SAMD9L targeting guide sequence portion
gguuuggaguccagaauauc

SEQ ID NO: 12509 - RNA, 20 nt, Artificial Sequence
  SAMD9L targeting guide sequence portion
guaacaggaucucccaagug

SEQ ID NO: 12510 - RNA, 20 nt, Artificial Sequence
  SAMD9L targeting guide sequence portion
guaacuuagauauucuggac

SEQ ID NO: 12511 - RNA, 20 nt, Artificial Sequence
  SAMD9L targeting guide sequence portion
guaagacauaacuaaaggcu

SEQ ID NO: 12512 - RNA, 20 nt, Artificial Sequence
  SAMD9L targeting guide sequence portion
guaauguaacuuagauauuc

SEQ ID NO: 12513 - RNA, 20 nt, Artificial Sequence
  SAMD9L targeting guide sequence portion
guagagaaaaaaguuauaau

SEQ ID NO: 12514 - RNA, 20 nt, Artificial Sequence
  SAMD9L targeting guide sequence portion
guaguuuuuccuccuuucau

SEQ ID NO: 12515 - RNA, 20 nt, Artificial Sequence
  SAMD9L targeting guide sequence portion
guauagccacuugggagauc

SEQ ID NO: 12516 - RNA, 20 nt, Artificial Sequence
  SAMD9L targeting guide sequence portion
guaucucuuuguaauguaac

SEQ ID NO: 12517 - RNA, 20 nt, Artificial Sequence
  SAMD9L targeting guide sequence portion
guaucuuagagagcuuccuu

SEQ ID NO: 12518 - RNA, 20 nt, Artificial Sequence
  SAMD9L targeting guide sequence portion
guauggacugguggacugca

SEQ ID NO: 12519 - RNA, 20 nt, Artificial Sequence
  SAMD9L targeting guide sequence portion
gucagaauuauuaacucuaa

SEQ ID NO: 12520 - RNA, 20 nt, Artificial Sequence
  SAMD9L targeting guide sequence portion
gucagcagcagacacagcuu

SEQ ID NO: 12521 - RNA, 20 nt, Artificial Sequence
  SAMD9L targeting guide sequence portion
gucaucaagaagucuaugcu

SEQ ID NO: 12522 - RNA, 20 nt, Artificial Sequence
  SAMD9L targeting guide sequence portion
guccaccaguccauacagua

SEQ ID NO: 12523 - RNA, 20 nt, Artificial Sequence
  SAMD9L targeting guide sequence portion
guccagaacaugucccucuu

SEQ ID NO: 12524 - RNA, 20 nt, Artificial Sequence
  SAMD9L targeting guide sequence portion
guccagaauaucuaaguuac

SEQ ID NO: 12525 - RNA, 20 nt, Artificial Sequence
  SAMD9L targeting guide sequence portion
guccagcaggggaguuuaaa

SEQ ID NO: 12526 - RNA, 20 nt, Artificial Sequence
  SAMD9L targeting guide sequence portion
guccauacaguaacaggauc

SEQ ID NO: 12527 - RNA, 20 nt, Artificial Sequence
  SAMD9L targeting guide sequence portion
guccccaggccuaugaacaa

SEQ ID NO: 12528 - RNA, 20 nt, Artificial Sequence
  SAMD9L targeting guide sequence portion
gucccucuuucugaaagcug

SEQ ID NO: 12529 - RNA, 20 nt, Artificial Sequence
  SAMD9L targeting guide sequence portion
gucuaugcucuaucaggguu

SEQ ID NO: 12530 - RNA, 20 nt, Artificial Sequence
  SAMD9L targeting guide sequence portion
gucugcugcugacccugcuc

SEQ ID NO: 12531 - RNA, 20 nt, Artificial Sequence
  SAMD9L targeting guide sequence portion
gucuuacuaaauguuauagu

SEQ ID NO: 12532 - RNA, 20 nt, Artificial Sequence
  SAMD9L targeting guide sequence portion
gugagcguugcccagauuca

SEQ ID NO: 12533 - RNA, 20 nt, Artificial Sequence
  SAMD9L targeting guide sequence portion
guggacugcagaagagggag

SEQ ID NO: 12534 - RNA, 20 nt, Artificial Sequence
  SAMD9L targeting guide sequence portion
guggcuauacuccccaaguu

SEQ ID NO: 12535 - RNA, 20 nt, Artificial Sequence
  SAMD9L targeting guide sequence portion
guggggucagaauuauuaac

SEQ ID NO: 12536 - RNA, 20 nt, Artificial Sequence
  SAMD9L targeting guide sequence portion
gugguggggucagaauuauu

SEQ ID NO: 12537 - RNA, 20 nt, Artificial Sequence
  SAMD9L targeting guide sequence portion
gugucugcugcugacccugc

SEQ ID NO: 12538 - RNA, 20 nt, Artificial Sequence
  SAMD9L targeting guide sequence portion
guuaauaauucugaccccac

SEQ ID NO: 12539 - RNA, 20 nt, Artificial Sequence
  SAMD9L targeting guide sequence portion
guuacauuacaaagagauac

SEQ ID NO: 12540 - RNA, 20 nt, Artificial Sequence
  SAMD9L targeting guide sequence portion
guuacuguauggacuggugg

SEQ ID NO: 12541 - RNA, 20 nt, Artificial Sequence
  SAMD9L targeting guide sequence portion
guuagcaggaauauuuagua

SEQ ID NO: 12542 - RNA, 20 nt, Artificial Sequence
  SAMD9L targeting guide sequence portion
guuauaaugaaaggaggaaa

SEQ ID NO: 12543 - RNA, 20 nt, Artificial Sequence
  SAMD9L targeting guide sequence portion
guuauaguccagcaggggag

SEQ ID NO: 12544 - RNA, 20 nt, Artificial Sequence
  SAMD9L targeting guide sequence portion
guuaugucuuacuaaauguu

SEQ ID NO: 12545 - RNA, 20 nt, Artificial Sequence
  SAMD9L targeting guide sequence portion
guucauaggccuggggacau

SEQ ID NO: 12546 - RNA, 20 nt, Artificial Sequence
  SAMD9L targeting guide sequence portion
guucuggaccaugugagcgu

SEQ ID NO: 12547 - RNA, 20 nt, Artificial Sequence
  SAMD9L targeting guide sequence portion
guucuucuggccuauauuuc

SEQ ID NO: 12548 - RNA, 20 nt, Artificial Sequence
  SAMD9L targeting guide sequence portion
guugaaaugggggcuaagga

SEQ ID NO: 12549 - RNA, 20 nt, Artificial Sequence
  SAMD9L targeting guide sequence portion
guugcccagauucauagaaa

SEQ ID NO: 12550 - RNA, 20 nt, Artificial Sequence
  SAMD9L targeting guide sequence portion
guugccucccucuucugcag

SEQ ID NO: 12551 - RNA, 20 nt, Artificial Sequence
  SAMD9L targeting guide sequence portion
guuguucauaggccugggga

SEQ ID NO: 12552 - RNA, 20 nt, Artificial Sequence
  SAMD9L targeting guide sequence portion
guuuaaaagaaauaggauca

SEQ ID NO: 12553 - RNA, 20 nt, Artificial Sequence
  SAMD9L targeting guide sequence portion
guuuggagcagggucagcag

SEQ ID NO: 12554 - RNA, 20 nt, Artificial Sequence
  SAMD9L targeting guide sequence portion
guuuggaguccagaauaucu

SEQ ID NO: 12555 - RNA, 20 nt, Artificial Sequence
  SAMD9L targeting guide sequence portion
guuuuuccuccuuucauuau

SEQ ID NO: 12556 - RNA, 20 nt, Artificial Sequence
  SAMD9L targeting guide sequence portion
uaaaagaaauaggaucaggc

SEQ ID NO: 12557 - RNA, 20 nt, Artificial Sequence
  SAMD9L targeting guide sequence portion
uaaacuccccugcuggacua

SEQ ID NO: 12558 - RNA, 20 nt, Artificial Sequence
  SAMD9L targeting guide sequence portion
uaaagauaauuaugguuagc

SEQ ID NO: 12559 - RNA, 20 nt, Artificial Sequence
  SAMD9L targeting guide sequence portion
uaaaggcuugauguagagaa

SEQ ID NO: 12560 - RNA, 20 nt, Artificial Sequence
  SAMD9L targeting guide sequence portion
uaaauauuccugcuaaccau

SEQ ID NO: 12561 - RNA, 20 nt, Artificial Sequence
  SAMD9L targeting guide sequence portion
uaaauguuauaguccagcag

SEQ ID NO: 12562 - RNA, 20 nt, Artificial Sequence
  SAMD9L targeting guide sequence portion
uaacaggaucucccaagugg

SEQ ID NO: 12563 - RNA, 20 nt, Artificial Sequence
  SAMD9L targeting guide sequence portion
uaacauuuaguaagacauaa

SEQ ID NO: 12564 - RNA, 20 nt, Artificial Sequence
  SAMD9L targeting guide sequence portion
uaaccauaauuaucuuuaga

SEQ ID NO: 12565 - RNA, 20 nt, Artificial Sequence
  SAMD9L targeting guide sequence portion
uaacuaaaggcuugauguag

SEQ ID NO: 12566 - RNA, 20 nt, Artificial Sequence
  SAMD9L targeting guide sequence portion
uaacucuaaagauaauuaug

SEQ ID NO: 12567 - RNA, 20 nt, Artificial Sequence
  SAMD9L targeting guide sequence portion
uaacuuagauauucuggacu

SEQ ID NO: 12568 - RNA, 20 nt, Artificial Sequence
  SAMD9L targeting guide sequence portion
uaacuuuuuucucuacauca

SEQ ID NO: 12569 - RNA, 20 nt, Artificial Sequence
  SAMD9L targeting guide sequence portion
uaagacauaacuaaaggcuu

SEQ ID NO: 12570 - RNA, 20 nt, Artificial Sequence
  SAMD9L targeting guide sequence portion
uaagauaccugguggugggg

SEQ ID NO: 12571 - RNA, 20 nt, Artificial Sequence
  SAMD9L targeting guide sequence portion
uaaggagaaggaagcucucu

SEQ ID NO: 12572 - RNA, 20 nt, Artificial Sequence
  SAMD9L targeting guide sequence portion
uaaguuacauuacaaagaga

SEQ ID NO: 12573 - RNA, 20 nt, Artificial Sequence
  SAMD9L targeting guide sequence portion
uaauaauucugaccccacca

SEQ ID NO: 12574 - RNA, 20 nt, Artificial Sequence
  SAMD9L targeting guide sequence portion
uaaugaaaggaggaaaaacu

SEQ ID NO: 12575 - RNA, 20 nt, Artificial Sequence
  SAMD9L targeting guide sequence portion
uaauguaacuuagauauucu

SEQ ID NO: 12576 - RNA, 20 nt, Artificial Sequence
  SAMD9L targeting guide sequence portion
uaauuaucuuuagaguuaau

SEQ ID NO: 12577 - RNA, 20 nt, Artificial Sequence
  SAMD9L targeting guide sequence portion
uaauuaugguuagcaggaau

SEQ ID NO: 12578 - RNA, 20 nt, Artificial Sequence
  SAMD9L targeting guide sequence portion
uaauucugaccccaccacca

SEQ ID NO: 12579 - RNA, 20 nt, Artificial Sequence
  SAMD9L targeting guide sequence portion
uacaguaacaggaucuccca

SEQ ID NO: 12580 - RNA, 20 nt, Artificial Sequence
  SAMD9L targeting guide sequence portion
uacaucaagccuuuaguuau

SEQ ID NO: 12581 - RNA, 20 nt, Artificial Sequence
  SAMD9L targeting guide sequence portion
uacauuacaaagagauacaa

SEQ ID NO: 12582 - RNA, 20 nt, Artificial Sequence
  SAMD9L targeting guide sequence portion
uaccuggugguggggucaga

SEQ ID NO: 12583 - RNA, 20 nt, Artificial Sequence
  SAMD9L targeting guide sequence portion
uacuaaauauuccugcuaac

SEQ ID NO: 12584 - RNA, 20 nt, Artificial Sequence
  SAMD9L targeting guide sequence portion
uacuaaauguuauaguccag

SEQ ID NO: 12585 - RNA, 20 nt, Artificial Sequence
  SAMD9L targeting guide sequence portion
uacuccccaaguuguucaua

SEQ ID NO: 12586 - RNA, 20 nt, Artificial Sequence
  SAMD9L targeting guide sequence portion
uacuguauggacugguggac

SEQ ID NO: 12587 - RNA, 20 nt, Artificial Sequence
  SAMD9L targeting guide sequence portion
uagaaauauaggccagaaga

SEQ ID NO: 12588 - RNA, 20 nt, Artificial Sequence
  SAMD9L targeting guide sequence portion
uagacuucuugaugacaaga

SEQ ID NO: 12589 - RNA, 20 nt, Artificial Sequence
  SAMD9L targeting guide sequence portion
uagagaaaaaaguuauaaug

SEQ ID NO: 12590 - RNA, 20 nt, Artificial Sequence
  SAMD9L targeting guide sequence portion
uagagagcuuccuucuccuu

SEQ ID NO: 12591 - RNA, 20 nt, Artificial Sequence
  SAMD9L targeting guide sequence portion
uagagcauagacuucuugau

SEQ ID NO: 12592 - RNA, 20 nt, Artificial Sequence
  SAMD9L targeting guide sequence portion
uagaguuaauaauucugacc

SEQ ID NO: 12593 - RNA, 20 nt, Artificial Sequence
  SAMD9L targeting guide sequence portion
uagauauucuggacuccaaa

SEQ ID NO: 12594 - RNA, 20 nt, Artificial Sequence
  SAMD9L targeting guide sequence portion
uagcaggaauauuuaguagu

SEQ ID NO: 12595 - RNA, 20 nt, Artificial Sequence
  SAMD9L targeting guide sequence portion
uagccacuugggagauccug

SEQ ID NO: 12596 - RNA, 20 nt, Artificial Sequence
  SAMD9L targeting guide sequence portion
uaggaucaggccuauguccc

SEQ ID NO: 12597 - RNA, 20 nt, Artificial Sequence
  SAMD9L targeting guide sequence portion
uaggccagaagaacccugau

SEQ ID NO: 12598 - RNA, 20 nt, Artificial Sequence
  SAMD9L targeting guide sequence portion
uaggccugauccuauuucuu

SEQ ID NO: 12599 - RNA, 20 nt, Artificial Sequence
  SAMD9L targeting guide sequence portion
uaggccuggggacauaggcc

SEQ ID NO: 12600 - RNA, 20 nt, Artificial Sequence
  SAMD9L targeting guide sequence portion
uaguaagacauaacuaaagg

SEQ ID NO: 12601 - RNA, 20 nt, Artificial Sequence
  SAMD9L targeting guide sequence portion
uaguaguuuuuccuccuuuc

SEQ ID NO: 12602 - RNA, 20 nt, Artificial Sequence
  SAMD9L targeting guide sequence portion
uaguccagcaggggaguuua

SEQ ID NO: 12603 - RNA, 20 nt, Artificial Sequence
  SAMD9L targeting guide sequence portion
uaguuaugucuuacuaaaug

SEQ ID NO: 12604 - RNA, 20 nt, Artificial Sequence
  SAMD9L targeting guide sequence portion
uaguuuuuccuccuuucauu

SEQ ID NO: 12605 - RNA, 20 nt, Artificial Sequence
  SAMD9L targeting guide sequence portion
uauaacauuuaguaagacau

SEQ ID NO: 12606 - RNA, 20 nt, Artificial Sequence
  SAMD9L targeting guide sequence portion
uauaacuuuuuucucuacau

SEQ ID NO: 12607 - RNA, 20 nt, Artificial Sequence
  SAMD9L targeting guide sequence portion
uauaaugaaaggaggaaaaa

SEQ ID NO: 12608 - RNA, 20 nt, Artificial Sequence
  SAMD9L targeting guide sequence portion
uauacuccccaaguuguuca

SEQ ID NO: 12609 - RNA, 20 nt, Artificial Sequence
  SAMD9L targeting guide sequence portion
uauagccacuugggagaucc

SEQ ID NO: 12610 - RNA, 20 nt, Artificial Sequence
  SAMD9L targeting guide sequence portion
uauaggccagaagaacccug

SEQ ID NO: 12611 - RNA, 20 nt, Artificial Sequence
  SAMD9L targeting guide sequence portion
uauaguccagcaggggaguu

SEQ ID NO: 12612 - RNA, 20 nt, Artificial Sequence
  SAMD9L targeting guide sequence portion
uauauuucuaugaaucuggg

SEQ ID NO: 12613 - RNA, 20 nt, Artificial Sequence
  SAMD9L targeting guide sequence portion
uaucaggguucuucuggccu

SEQ ID NO: 12614 - RNA, 20 nt, Artificial Sequence
  SAMD9L targeting guide sequence portion
uaucuaaguuacauuacaaa

SEQ ID NO: 12615 - RNA, 20 nt, Artificial Sequence
  SAMD9L targeting guide sequence portion
uaucucuuuguaauguaacu

SEQ ID NO: 12616 - RNA, 20 nt, Artificial Sequence
  SAMD9L targeting guide sequence portion
uaucuuagagagcuuccuuc

SEQ ID NO: 12617 - RNA, 20 nt, Artificial Sequence
  SAMD9L targeting guide sequence portion
uaucuuuagaguuaauaauu

SEQ ID NO: 12618 - RNA, 20 nt, Artificial Sequence
  SAMD9L targeting guide sequence portion
uaugaacaacuuggggagua

SEQ ID NO: 12619 - RNA, 20 nt, Artificial Sequence
  SAMD9L targeting guide sequence portion
uaugaaucugggcaacgcuc

SEQ ID NO: 12620 - RNA, 20 nt, Artificial Sequence
  SAMD9L targeting guide sequence portion
uaugcucuaucaggguucuu

SEQ ID NO: 12621 - RNA, 20 nt, Artificial Sequence
  SAMD9L targeting guide sequence portion
uauggacugguggacugcag

SEQ ID NO: 12622 - RNA, 20 nt, Artificial Sequence
  SAMD9L targeting guide sequence portion
uaugguuagcaggaauauuu

SEQ ID NO: 12623 - RNA, 20 nt, Artificial Sequence
  SAMD9L targeting guide sequence portion
uauguccccaggccuaugaa

SEQ ID NO: 12624 - RNA, 20 nt, Artificial Sequence
  SAMD9L targeting guide sequence portion
uaugucuuacuaaauguuau

SEQ ID NO: 12625 - RNA, 20 nt, Artificial Sequence
  SAMD9L targeting guide sequence portion
uauuaacucuaaagauaauu

SEQ ID NO: 12626 - RNA, 20 nt, Artificial Sequence
  SAMD9L targeting guide sequence portion
uauuccugcuaaccauaauu

SEQ ID NO: 12627 - RNA, 20 nt, Artificial Sequence
  SAMD9L targeting guide sequence portion
uauucuggacuccaaaccca

SEQ ID NO: 12628 - RNA, 20 nt, Artificial Sequence
  SAMD9L targeting guide sequence portion
uauuuaguaguuuuuccucc

SEQ ID NO: 12629 - RNA, 20 nt, Artificial Sequence
  SAMD9L targeting guide sequence portion
uauuucuaugaaucugggca

SEQ ID NO: 12630 - RNA, 20 nt, Artificial Sequence
  SAMD9L targeting guide sequence portion
uauuucuuuuaaacuccccu

SEQ ID NO: 12631 - RNA, 20 nt, Artificial Sequence
  SAMD9L targeting guide sequence portion
ucaagaagucuaugcucuau

SEQ ID NO: 12632 - RNA, 20 nt, Artificial Sequence
  SAMD9L targeting guide sequence portion
ucaagccuuuaguuaugucu

SEQ ID NO: 12633 - RNA, 20 nt, Artificial Sequence
  SAMD9L targeting guide sequence portion
ucacaugguccagaacaugu

SEQ ID NO: 12634 - RNA, 20 nt, Artificial Sequence
  SAMD9L targeting guide sequence portion
ucagaaagagggacauguuc

SEQ ID NO: 12635 - RNA, 20 nt, Artificial Sequence
  SAMD9L targeting guide sequence portion
ucagaauuauuaacucuaaa

SEQ ID NO: 12636 - RNA, 20 nt, Artificial Sequence
  SAMD9L targeting guide sequence portion
ucagcagcagacacagcuuu

SEQ ID NO: 12637 - RNA, 20 nt, Artificial Sequence
  SAMD9L targeting guide sequence portion
ucaggccuauguccccaggc

SEQ ID NO: 12638 - RNA, 20 nt, Artificial Sequence
  SAMD9L targeting guide sequence portion
ucaggguucuucuggccuau

SEQ ID NO: 12639 - RNA, 20 nt, Artificial Sequence
  SAMD9L targeting guide sequence portion
ucauagaaauauaggccaga

SEQ ID NO: 12640 - RNA, 20 nt, Artificial Sequence
  SAMD9L targeting guide sequence portion
ucauaggccuggggacauag

SEQ ID NO: 12641 - RNA, 20 nt, Artificial Sequence
  SAMD9L targeting guide sequence portion
ucaucaagaagucuaugcuc

SEQ ID NO: 12642 - RNA, 20 nt, Artificial Sequence
  SAMD9L targeting guide sequence portion
ucauuauaacuuuuuucucu

SEQ ID NO: 12643 - RNA, 20 nt, Artificial Sequence
  SAMD9L targeting guide sequence portion
uccaaacaguugccucccuc

SEQ ID NO: 12644 - RNA, 20 nt, Artificial Sequence
  SAMD9L targeting guide sequence portion
uccaaacccaauucuucuug

SEQ ID NO: 12645 - RNA, 20 nt, Artificial Sequence
  SAMD9L targeting guide sequence portion
uccaccaguccauacaguaa

SEQ ID NO: 12646 - RNA, 20 nt, Artificial Sequence
  SAMD9L targeting guide sequence portion
uccagaacaugucccucuuu

SEQ ID NO: 12647 - RNA, 20 nt, Artificial Sequence
  SAMD9L targeting guide sequence portion
uccagaauaucuaaguuaca

SEQ ID NO: 12648 - RNA, 20 nt, Artificial Sequence
  SAMD9L targeting guide sequence portion
uccagcaggggaguuuaaaa

SEQ ID NO: 12649 - RNA, 20 nt, Artificial Sequence
  SAMD9L targeting guide sequence portion
uccauacaguaacaggaucu

SEQ ID NO: 12650 - RNA, 20 nt, Artificial Sequence
  SAMD9L targeting guide sequence portion
ucccaaguggcuauacuccc

SEQ ID NO: 12651 - RNA, 20 nt, Artificial Sequence
  SAMD9L targeting guide sequence portion
uccccaaguuguucauaggc

SEQ ID NO: 12652 - RNA, 20 nt, Artificial Sequence
  SAMD9L targeting guide sequence portion
uccccaggccuaugaacaac

SEQ ID NO: 12653 - RNA, 20 nt, Artificial Sequence
  SAMD9L targeting guide sequence portion
uccccugcuggacuauaaca

SEQ ID NO: 12654 - RNA, 20 nt, Artificial Sequence
  SAMD9L targeting guide sequence portion
ucccucuucugcaguccacc

SEQ ID NO: 12655 - RNA, 20 nt, Artificial Sequence
  SAMD9L targeting guide sequence portion
ucccucuuucugaaagcugu

SEQ ID NO: 12656 - RNA, 20 nt, Artificial Sequence
  SAMD9L targeting guide sequence portion
uccuauuucuuuuaaacucc

SEQ ID NO: 12657 - RNA, 20 nt, Artificial Sequence
  SAMD9L targeting guide sequence portion
uccuccuuucauuauaacuu

SEQ ID NO: 12658 - RNA, 20 nt, Artificial Sequence
  SAMD9L targeting guide sequence portion
uccugcuaaccauaauuauc

SEQ ID NO: 12659 - RNA, 20 nt, Artificial Sequence
  SAMD9L targeting guide sequence portion
uccuguuacuguauggacug

SEQ ID NO: 12660 - RNA, 20 nt, Artificial Sequence
  SAMD9L targeting guide sequence portion
uccuucuccuuagcccccau

SEQ ID NO: 12661 - RNA, 20 nt, Artificial Sequence
  SAMD9L targeting guide sequence portion
uccuuucauuauaacuuuuu

SEQ ID NO: 12662 - RNA, 20 nt, Artificial Sequence
  SAMD9L targeting guide sequence portion
ucuaaagauaauuaugguua

SEQ ID NO: 12663 - RNA, 20 nt, Artificial Sequence
  SAMD9L targeting guide sequence portion
ucuaagauaccugguggugg

SEQ ID NO: 12664 - RNA, 20 nt, Artificial Sequence
  SAMD9L targeting guide sequence portion
ucuaaguuacauuacaaaga

SEQ ID NO: 12665 - RNA, 20 nt, Artificial Sequence
  SAMD9L targeting guide sequence portion
ucuacaucaagccuuuaguu

SEQ ID NO: 12666 - RNA, 20 nt, Artificial Sequence
  SAMD9L targeting guide sequence portion
ucuaucaggguucuucuggc

SEQ ID NO: 12667 - RNA, 20 nt, Artificial Sequence
  SAMD9L targeting guide sequence portion
ucuaugaaucugggcaacgc

SEQ ID NO: 12668 - RNA, 20 nt, Artificial Sequence
  SAMD9L targeting guide sequence portion
ucuaugcucuaucaggguuc

SEQ ID NO: 12669 - RNA, 20 nt, Artificial Sequence
  SAMD9L targeting guide sequence portion
ucucccaaguggcuauacuc

SEQ ID NO: 12670 - RNA, 20 nt, Artificial Sequence
  SAMD9L targeting guide sequence portion
ucuccuuagcccccauuuca

SEQ ID NO: 12671 - RNA, 20 nt, Artificial Sequence
  SAMD9L targeting guide sequence portion
ucucuaagauaccugguggu

SEQ ID NO: 12672 - RNA, 20 nt, Artificial Sequence
  SAMD9L targeting guide sequence portion
ucucuacaucaagccuuuag

SEQ ID NO: 12673 - RNA, 20 nt, Artificial Sequence
  SAMD9L targeting guide sequence portion
ucucuuuguaauguaacuua

SEQ ID NO: 12674 - RNA, 20 nt, Artificial Sequence
  SAMD9L targeting guide sequence portion
ucugaaagcugugucugcug

SEQ ID NO: 12675 - RNA, 20 nt, Artificial Sequence
  SAMD9L targeting guide sequence portion
ucugaccccaccaccaggua

SEQ ID NO: 12676 - RNA, 20 nt, Artificial Sequence
  SAMD9L targeting guide sequence portion
ucugcaguccaccaguccau

SEQ ID NO: 12677 - RNA, 20 nt, Artificial Sequence
  SAMD9L targeting guide sequence portion
ucugcugcugacccugcucc

SEQ ID NO: 12678 - RNA, 20 nt, Artificial Sequence
  SAMD9L targeting guide sequence portion
ucuggaccaugugagcguug

SEQ ID NO: 12679 - RNA, 20 nt, Artificial Sequence
  SAMD9L targeting guide sequence portion
ucuggacuccaaacccaauu

SEQ ID NO: 12680 - RNA, 20 nt, Artificial Sequence
  SAMD9L targeting guide sequence portion
ucuggccuauauuucuauga

SEQ ID NO: 12681 - RNA, 20 nt, Artificial Sequence
  SAMD9L targeting guide sequence portion
ucugggcaacgcucacaugg

SEQ ID NO: 12682 - RNA, 20 nt, Artificial Sequence
  SAMD9L targeting guide sequence portion
ucuuacuaaauguuauaguc

SEQ ID NO: 12683 - RNA, 20 nt, Artificial Sequence
  SAMD9L targeting guide sequence portion
ucuuagagagcuuccuucuc

SEQ ID NO: 12684 - RNA, 20 nt, Artificial Sequence
  SAMD9L targeting guide sequence portion
ucuucugcaguccaccaguc

SEQ ID NO: 12685 - RNA, 20 nt, Artificial Sequence
  SAMD9L targeting guide sequence portion
ucuucuggccuauauuucua

SEQ ID NO: 12686 - RNA, 20 nt, Artificial Sequence
  SAMD9L targeting guide sequence portion
ucuucuugucaucaagaagu

SEQ ID NO: 12687 - RNA, 20 nt, Artificial Sequence
  SAMD9L targeting guide sequence portion
ucuugaugacaagaagaauu

SEQ ID NO: 12688 - RNA, 20 nt, Artificial Sequence
  SAMD9L targeting guide sequence portion
ucuugucaucaagaagucua

SEQ ID NO: 12689 - RNA, 20 nt, Artificial Sequence
  SAMD9L targeting guide sequence portion
ucuuuagaguuaauaauucu

SEQ ID NO: 12690 - RNA, 20 nt, Artificial Sequence
  SAMD9L targeting guide sequence portion
ucuuucugaaagcugugucu

SEQ ID NO: 12691 - RNA, 20 nt, Artificial Sequence
  SAMD9L targeting guide sequence portion
ucuuuguaauguaacuuaga

SEQ ID NO: 12692 - RNA, 20 nt, Artificial Sequence
  SAMD9L targeting guide sequence portion
ucuuuguaucucuuuguaau

SEQ ID NO: 12693 - RNA, 20 nt, Artificial Sequence
  SAMD9L targeting guide sequence portion
ucuuuuaaacuccccugcug

SEQ ID NO: 12694 - RNA, 20 nt, Artificial Sequence
  SAMD9L targeting guide sequence portion
ugaaagcugugucugcugcu

SEQ ID NO: 12695 - RNA, 20 nt, Artificial Sequence
  SAMD9L targeting guide sequence portion
ugaaaggaggaaaaacuacu

SEQ ID NO: 12696 - RNA, 20 nt, Artificial Sequence
  SAMD9L targeting guide sequence portion
ugaaaugggggcuaaggaga

SEQ ID NO: 12697 - RNA, 20 nt, Artificial Sequence
  SAMD9L targeting guide sequence portion
ugaacaacuuggggaguaua

SEQ ID NO: 12698 - RNA, 20 nt, Artificial Sequence
  SAMD9L targeting guide sequence portion
ugaaucugggcaacgcucac

SEQ ID NO: 12699 - RNA, 20 nt, Artificial Sequence
  SAMD9L targeting guide sequence portion
ugacaagaagaauuggguuu

SEQ ID NO: 12700 - RNA, 20 nt, Artificial Sequence
  SAMD9L targeting guide sequence portion
ugaccccaccaccagguauc

SEQ ID NO: 12701 - RNA, 20 nt, Artificial Sequence
  SAMD9L targeting guide sequence portion
ugacccugcuccaaacaguu

SEQ ID NO: 12702 - RNA, 20 nt, Artificial Sequence
  SAMD9L targeting guide sequence portion
ugagcguugcccagauucau

SEQ ID NO: 12703 - RNA, 20 nt, Artificial Sequence
  SAMD9L targeting guide sequence portion
ugauagagcauagacuucuu

SEQ ID NO: 12704 - RNA, 20 nt, Artificial Sequence
  SAMD9L targeting guide sequence portion
ugauccuauuucuuuuaaac

SEQ ID NO: 12705 - RNA, 20 nt, Artificial Sequence
  SAMD9L targeting guide sequence portion
ugaugacaagaagaauuggg

SEQ ID NO: 12706 - RNA, 20 nt, Artificial Sequence
  SAMD9L targeting guide sequence portion
ugauguagagaaaaaaguua

SEQ ID NO: 12707 - RNA, 20 nt, Artificial Sequence
  SAMD9L targeting guide sequence portion
ugcagaagagggaggcaacu

SEQ ID NO: 12708 - RNA, 20 nt, Artificial Sequence
  SAMD9L targeting guide sequence portion
ugcaguccaccaguccauac

SEQ ID NO: 12709 - RNA, 20 nt, Artificial Sequence
  SAMD9L targeting guide sequence portion
ugcccagauucauagaaaua

SEQ ID NO: 12710 - RNA, 20 nt, Artificial Sequence
  SAMD9L targeting guide sequence portion
ugccucccucuucugcaguc

SEQ ID NO: 12711 - RNA, 20 nt, Artificial Sequence
  SAMD9L targeting guide sequence portion
ugcuaaccauaauuaucuuu

SEQ ID NO: 12712 - RNA, 20 nt, Artificial Sequence
  SAMD9L targeting guide sequence portion
ugcuccaaacaguugccucc

SEQ ID NO: 12713 - RNA, 20 nt, Artificial Sequence
  SAMD9L targeting guide sequence portion
ugcucuaucaggguucuucu

SEQ ID NO: 12714 - RNA, 20 nt, Artificial Sequence
  SAMD9L targeting guide sequence portion
ugcugacccugcuccaaaca

SEQ ID NO: 12715 - RNA, 20 nt, Artificial Sequence
  SAMD9L targeting guide sequence portion
ugcugcugacccugcuccaa

SEQ ID NO: 12716 - RNA, 20 nt, Artificial Sequence
  SAMD9L targeting guide sequence portion
ugcuggacuauaacauuuag

SEQ ID NO: 12717 - RNA, 20 nt, Artificial Sequence
  SAMD9L targeting guide sequence portion
uggaccaugugagcguugcc

SEQ ID NO: 12718 - RNA, 20 nt, Artificial Sequence
  SAMD9L targeting guide sequence portion
uggacuauaacauuuaguaa

SEQ ID NO: 12719 - RNA, 20 nt, Artificial Sequence
  SAMD9L targeting guide sequence portion
uggacuccaaacccaauucu

SEQ ID NO: 12720 - RNA, 20 nt, Artificial Sequence
  SAMD9L targeting guide sequence portion
uggacugcagaagagggagg

SEQ ID NO: 12721 - RNA, 20 nt, Artificial Sequence
  SAMD9L targeting guide sequence portion
uggacugguggacugcagaa

SEQ ID NO: 12722 - RNA, 20 nt, Artificial Sequence
  SAMD9L targeting guide sequence portion
uggagcagggucagcagcag

SEQ ID NO: 12723 - RNA, 20 nt, Artificial Sequence
  SAMD9L targeting guide sequence portion
uggaguccagaauaucuaag

SEQ ID NO: 12724 - RNA, 20 nt, Artificial Sequence
  SAMD9L targeting guide sequence portion
uggccuauauuucuaugaau

SEQ ID NO: 12725 - RNA, 20 nt, Artificial Sequence
  SAMD9L targeting guide sequence portion
uggcuauacuccccaaguug

SEQ ID NO: 12726 - RNA, 20 nt, Artificial Sequence
  SAMD9L targeting guide sequence portion
ugggagauccuguuacugua

SEQ ID NO: 12727 - RNA, 20 nt, Artificial Sequence
  SAMD9L targeting guide sequence portion
ugggcaacgcucacaugguc

SEQ ID NO: 12728 - RNA, 20 nt, Artificial Sequence
  SAMD9L targeting guide sequence portion
uggggacauaggccugaucc

SEQ ID NO: 12729 - RNA, 20 nt, Artificial Sequence
  SAMD9L targeting guide sequence portion
uggggaguauagccacuugg

SEQ ID NO: 12730 - RNA, 20 nt, Artificial Sequence
  SAMD9L targeting guide sequence portion
ugggggcuaaggagaaggaa

SEQ ID NO: 12731 - RNA, 20 nt, Artificial Sequence
  SAMD9L targeting guide sequence portion
uggggucagaauuauuaacu

SEQ ID NO: 12732 - RNA, 20 nt, Artificial Sequence
  SAMD9L targeting guide sequence portion
uggguuuggaguccagaaua

SEQ ID NO: 12733 - RNA, 20 nt, Artificial Sequence
  SAMD9L targeting guide sequence portion
ugguccagaacaugucccuc

SEQ ID NO: 12734 - RNA, 20 nt, Artificial Sequence
  SAMD9L targeting guide sequence portion
ugguggacugcagaagaggg

SEQ ID NO: 12735 - RNA, 20 nt, Artificial Sequence
  SAMD9L targeting guide sequence portion
ugguggggucagaauuauua

SEQ ID NO: 12736 - RNA, 20 nt, Artificial Sequence
  SAMD9L targeting guide sequence portion
uggugguggggucagaauua

SEQ ID NO: 12737 - RNA, 20 nt, Artificial Sequence
  SAMD9L targeting guide sequence portion
ugguuagcaggaauauuuag

SEQ ID NO: 12738 - RNA, 20 nt, Artificial Sequence
  SAMD9L targeting guide sequence portion
uguaacuuagauauucugga

SEQ ID NO: 12739 - RNA, 20 nt, Artificial Sequence
  SAMD9L targeting guide sequence portion
uguaauguaacuuagauauu

SEQ ID NO: 12740 - RNA, 20 nt, Artificial Sequence
  SAMD9L targeting guide sequence portion
uguagagaaaaaaguuauaa

SEQ ID NO: 12741 - RNA, 20 nt, Artificial Sequence
  SAMD9L targeting guide sequence portion
uguaucucuuuguaauguaa

SEQ ID NO: 12742 - RNA, 20 nt, Artificial Sequence
  SAMD9L targeting guide sequence portion
uguauggacugguggacugc

SEQ ID NO: 12743 - RNA, 20 nt, Artificial Sequence
  SAMD9L targeting guide sequence portion
ugucaucaagaagucuaugc

SEQ ID NO: 12744 - RNA, 20 nt, Artificial Sequence
  SAMD9L targeting guide sequence portion
uguccccaggccuaugaaca

SEQ ID NO: 12745 - RNA, 20 nt, Artificial Sequence
  SAMD9L targeting guide sequence portion
ugucccucuuucugaaagcu

SEQ ID NO: 12746 - RNA, 20 nt, Artificial Sequence
  SAMD9L targeting guide sequence portion
ugucugcugcugacccugcu

SEQ ID NO: 12747 - RNA, 20 nt, Artificial Sequence
  SAMD9L targeting guide sequence portion
ugucuuacuaaauguuauag

SEQ ID NO: 12748 - RNA, 20 nt, Artificial Sequence
  SAMD9L targeting guide sequence portion
ugugagcguugcccagauuc

SEQ ID NO: 12749 - RNA, 20 nt, Artificial Sequence
  SAMD9L targeting guide sequence portion
ugugucugcugcugacccug

SEQ ID NO: 12750 - RNA, 20 nt, Artificial Sequence
  SAMD9L targeting guide sequence portion
uguuacuguauggacuggug

SEQ ID NO: 12751 - RNA, 20 nt, Artificial Sequence
  SAMD9L targeting guide sequence portion
uguuauaguccagcagggga

SEQ ID NO: 12752 - RNA, 20 nt, Artificial Sequence
  SAMD9L targeting guide sequence portion
uguucauaggccuggggaca

SEQ ID NO: 12753 - RNA, 20 nt, Artificial Sequence
  SAMD9L targeting guide sequence portion
uguucuggaccaugugagcg

SEQ ID NO: 12754 - RNA, 20 nt, Artificial Sequence
  SAMD9L targeting guide sequence portion
uguugaaaugggggcuaagg

SEQ ID NO: 12755 - RNA, 20 nt, Artificial Sequence
  SAMD9L targeting guide sequence portion
uguuuggagcagggucagca

SEQ ID NO: 12756 - RNA, 20 nt, Artificial Sequence
  SAMD9L targeting guide sequence portion
uuaaaagaaauaggaucagg

SEQ ID NO: 12757 - RNA, 20 nt, Artificial Sequence
  SAMD9L targeting guide sequence portion
uuaaacuccccugcuggacu

SEQ ID NO: 12758 - RNA, 20 nt, Artificial Sequence
  SAMD9L targeting guide sequence portion
uuaacucuaaagauaauuau

SEQ ID NO: 12759 - RNA, 20 nt, Artificial Sequence
  SAMD9L targeting guide sequence portion
uuaauaauucugaccccacc

SEQ ID NO: 12760 - RNA, 20 nt, Artificial Sequence
  SAMD9L targeting guide sequence portion
uuacauuacaaagagauaca

SEQ ID NO: 12761 - RNA, 20 nt, Artificial Sequence
  SAMD9L targeting guide sequence portion
uuacuaaauguuauagucca

SEQ ID NO: 12762 - RNA, 20 nt, Artificial Sequence
  SAMD9L targeting guide sequence portion
uuacuguauggacuggugga

SEQ ID NO: 12763 - RNA, 20 nt, Artificial Sequence
  SAMD9L targeting guide sequence portion
uuagagagcuuccuucuccu

SEQ ID NO: 12764 - RNA, 20 nt, Artificial Sequence
  SAMD9L targeting guide sequence portion
uuagaguuaauaauucugac

SEQ ID NO: 12765 - RNA, 20 nt, Artificial Sequence
  SAMD9L targeting guide sequence portion
uuagauauucuggacuccaa

SEQ ID NO: 12766 - RNA, 20 nt, Artificial Sequence
  SAMD9L targeting guide sequence portion
uuagcaggaauauuuaguag

SEQ ID NO: 12767 - RNA, 20 nt, Artificial Sequence
  SAMD9L targeting guide sequence portion
uuaguaagacauaacuaaag

SEQ ID NO: 12768 - RNA, 20 nt, Artificial Sequence
  SAMD9L targeting guide sequence portion
uuaguaguuuuuccuccuuu

SEQ ID NO: 12769 - RNA, 20 nt, Artificial Sequence
  SAMD9L targeting guide sequence portion
uuaguuaugucuuacuaaau

SEQ ID NO: 12770 - RNA, 20 nt, Artificial Sequence
  SAMD9L targeting guide sequence portion
uuauaacuuuuuucucuaca

SEQ ID NO: 12771 - RNA, 20 nt, Artificial Sequence
  SAMD9L targeting guide sequence portion
uuauaaugaaaggaggaaaa

SEQ ID NO: 12772 - RNA, 20 nt, Artificial Sequence
  SAMD9L targeting guide sequence portion
uuauaguccagcaggggagu

SEQ ID NO: 12773 - RNA, 20 nt, Artificial Sequence
  SAMD9L targeting guide sequence portion
uuaucuuuagaguuaauaau

SEQ ID NO: 12774 - RNA, 20 nt, Artificial Sequence
  SAMD9L targeting guide sequence portion
uuaugguuagcaggaauauu

SEQ ID NO: 12775 - RNA, 20 nt, Artificial Sequence
  SAMD9L targeting guide sequence portion
uuaugucuuacuaaauguua

SEQ ID NO: 12776 - RNA, 20 nt, Artificial Sequence
  SAMD9L targeting guide sequence portion
uuauuaacucuaaagauaau

SEQ ID NO: 12777 - RNA, 20 nt, Artificial Sequence
  SAMD9L targeting guide sequence portion
uucagaaagagggacauguu

SEQ ID NO: 12778 - RNA, 20 nt, Artificial Sequence
  SAMD9L targeting guide sequence portion
uucauagaaauauaggccag

SEQ ID NO: 12779 - RNA, 20 nt, Artificial Sequence
  SAMD9L targeting guide sequence portion
uucauaggccuggggacaua

SEQ ID NO: 12780 - RNA, 20 nt, Artificial Sequence
  SAMD9L targeting guide sequence portion
uucauuauaacuuuuuucuc

SEQ ID NO: 12781 - RNA, 20 nt, Artificial Sequence
  SAMD9L targeting guide sequence portion
uuccuccuuucauuauaacu

SEQ ID NO: 12782 - RNA, 20 nt, Artificial Sequence
  SAMD9L targeting guide sequence portion
uuccugcuaaccauaauuau

SEQ ID NO: 12783 - RNA, 20 nt, Artificial Sequence
  SAMD9L targeting guide sequence portion
uuccuucuccuuagccccca

SEQ ID NO: 12784 - RNA, 20 nt, Artificial Sequence
  SAMD9L targeting guide sequence portion
uucuaugaaucugggcaacg

SEQ ID NO: 12785 - RNA, 20 nt, Artificial Sequence
  SAMD9L targeting guide sequence portion
uucuccuuagcccccauuuc

SEQ ID NO: 12786 - RNA, 20 nt, Artificial Sequence
  SAMD9L targeting guide sequence portion
uucucuacaucaagccuuua

SEQ ID NO: 12787 - RNA, 20 nt, Artificial Sequence
  SAMD9L targeting guide sequence portion
uucugaaagcugugucugcu

SEQ ID NO: 12788 - RNA, 20 nt, Artificial Sequence
  SAMD9L targeting guide sequence portion
uucugaccccaccaccaggu

SEQ ID NO: 12789 - RNA, 20 nt, Artificial Sequence
  SAMD9L targeting guide sequence portion
uucugcaguccaccagucca

SEQ ID NO: 12790 - RNA, 20 nt, Artificial Sequence
  SAMD9L targeting guide sequence portion
uucuggaccaugugagcguu

SEQ ID NO: 12791 - RNA, 20 nt, Artificial Sequence
  SAMD9L targeting guide sequence portion
uucuggacuccaaacccaau

SEQ ID NO: 12792 - RNA, 20 nt, Artificial Sequence
  SAMD9L targeting guide sequence portion
uucuggccuauauuucuaug

SEQ ID NO: 12793 - RNA, 20 nt, Artificial Sequence
  SAMD9L targeting guide sequence portion
uucuucuggccuauauuucu

SEQ ID NO: 12794 - RNA, 20 nt, Artificial Sequence
  SAMD9L targeting guide sequence portion
uucuucuugucaucaagaag

SEQ ID NO: 12795 - RNA, 20 nt, Artificial Sequence
  SAMD9L targeting guide sequence portion
uucuugaugacaagaagaau

SEQ ID NO: 12796 - RNA, 20 nt, Artificial Sequence
  SAMD9L targeting guide sequence portion
uucuugucaucaagaagucu

SEQ ID NO: 12797 - RNA, 20 nt, Artificial Sequence
  SAMD9L targeting guide sequence portion
uucuuuuaaacuccccugcu

SEQ ID NO: 12798 - RNA, 20 nt, Artificial Sequence
  SAMD9L targeting guide sequence portion
uugaaaugggggcuaaggag

SEQ ID NO: 12799 - RNA, 20 nt, Artificial Sequence
  SAMD9L targeting guide sequence portion
uugaugacaagaagaauugg

SEQ ID NO: 12800 - RNA, 20 nt, Artificial Sequence
  SAMD9L targeting guide sequence portion
uugauguagagaaaaaaguu

SEQ ID NO: 12801 - RNA, 20 nt, Artificial Sequence
  SAMD9L targeting guide sequence portion
uugcccagauucauagaaau

SEQ ID NO: 12802 - RNA, 20 nt, Artificial Sequence
  SAMD9L targeting guide sequence portion
uugccucccucuucugcagu

SEQ ID NO: 12803 - RNA, 20 nt, Artificial Sequence
  SAMD9L targeting guide sequence portion
uuggagcagggucagcagca

SEQ ID NO: 12804 - RNA, 20 nt, Artificial Sequence
  SAMD9L targeting guide sequence portion
uuggaguccagaauaucuaa

SEQ ID NO: 12805 - RNA, 20 nt, Artificial Sequence
  SAMD9L targeting guide sequence portion
uugggagauccuguuacugu

SEQ ID NO: 12806 - RNA, 20 nt, Artificial Sequence
  SAMD9L targeting guide sequence portion
uuggggaguauagccacuug

SEQ ID NO: 12807 - RNA, 20 nt, Artificial Sequence
  SAMD9L targeting guide sequence portion
uuggguuuggaguccagaau

SEQ ID NO: 12808 - RNA, 20 nt, Artificial Sequence
  SAMD9L targeting guide sequence portion
uuguaauguaacuuagauau

SEQ ID NO: 12809 - RNA, 20 nt, Artificial Sequence
  SAMD9L targeting guide sequence portion
uuguaucucuuuguaaugua

SEQ ID NO: 12810 - RNA, 20 nt, Artificial Sequence
  SAMD9L targeting guide sequence portion
uugucaucaagaagucuaug

SEQ ID NO: 12811 - RNA, 20 nt, Artificial Sequence
  SAMD9L targeting guide sequence portion
uuguucauaggccuggggac

SEQ ID NO: 12812 - RNA, 20 nt, Artificial Sequence
  SAMD9L targeting guide sequence portion
uuuaaaagaaauaggaucag

SEQ ID NO: 12813 - RNA, 20 nt, Artificial Sequence
  SAMD9L targeting guide sequence portion
uuuaaacuccccugcuggac

SEQ ID NO: 12814 - RNA, 20 nt, Artificial Sequence
  SAMD9L targeting guide sequence portion
uuuagaguuaauaauucuga

SEQ ID NO: 12815 - RNA, 20 nt, Artificial Sequence
  SAMD9L targeting guide sequence portion
uuuaguaagacauaacuaaa

SEQ ID NO: 12816 - RNA, 20 nt, Artificial Sequence
  SAMD9L targeting guide sequence portion
uuuaguaguuuuuccuccuu

SEQ ID NO: 12817 - RNA, 20 nt, Artificial Sequence
  SAMD9L targeting guide sequence portion
uuuaguuaugucuuacuaaa

SEQ ID NO: 12818 - RNA, 20 nt, Artificial Sequence
  SAMD9L targeting guide sequence portion
uuucagaaagagggacaugu

SEQ ID NO: 12819 - RNA, 20 nt, Artificial Sequence
  SAMD9L targeting guide sequence portion
uuucauuauaacuuuuuucu

SEQ ID NO: 12820 - RNA, 20 nt, Artificial Sequence
  SAMD9L targeting guide sequence portion
uuuccuccuuucauuauaac

SEQ ID NO: 12821 - RNA, 20 nt, Artificial Sequence
  SAMD9L targeting guide sequence portion
uuucuaugaaucugggcaac

SEQ ID NO: 12822 - RNA, 20 nt, Artificial Sequence
  SAMD9L targeting guide sequence portion
uuucucuacaucaagccuuu

SEQ ID NO: 12823 - RNA, 20 nt, Artificial Sequence
  SAMD9L targeting guide sequence portion
uuucugaaagcugugucugc

SEQ ID NO: 12824 - RNA, 20 nt, Artificial Sequence
  SAMD9L targeting guide sequence portion
uuucuuuuaaacuccccugc

SEQ ID NO: 12825 - RNA, 20 nt, Artificial Sequence
  SAMD9L targeting guide sequence portion
uuuggagcagggucagcagc

SEQ ID NO: 12826 - RNA, 20 nt, Artificial Sequence
  SAMD9L targeting guide sequence portion
uuuggaguccagaauaucua

SEQ ID NO: 12827 - RNA, 20 nt, Artificial Sequence
  SAMD9L targeting guide sequence portion
uuuguaauguaacuuagaua

SEQ ID NO: 12828 - RNA, 20 nt, Artificial Sequence
  SAMD9L targeting guide sequence portion
uuuguaucucuuuguaaugu

SEQ ID NO: 12829 - RNA, 20 nt, Artificial Sequence
  SAMD9L targeting guide sequence portion
uuuuaaacuccccugcugga

SEQ ID NO: 12830 - RNA, 20 nt, Artificial Sequence
  SAMD9L targeting guide sequence portion
uuuuccuccuuucauuauaa

SEQ ID NO: 12831 - RNA, 20 nt, Artificial Sequence
  SAMD9L targeting guide sequence portion
uuuucucuacaucaagccuu

SEQ ID NO: 12832 - RNA, 20 nt, Artificial Sequence
  SAMD9L targeting guide sequence portion
uuuuuccuccuuucauuaua

SEQ ID NO: 12833 - RNA, 20 nt, Artificial Sequence
  SAMD9L targeting guide sequence portion
uuuuucucuacaucaagccu

SEQ ID NO: 12834 - RNA, 20 nt, Artificial Sequence
  SAMD9L targeting guide sequence portion
uuuuuucucuacaucaagcc

SEQ ID NO: 12835 - RNA, 21 nt, Artificial Sequence
  SAMD9L targeting guide sequence portion
aaaaaaguuauaaugaaagga

SEQ ID NO: 12836 - RNA, 21 nt, Artificial Sequence
  SAMD9L targeting guide sequence portion
aaaaacuacuaaauauuccug

SEQ ID NO: 12837 - RNA, 21 nt, Artificial Sequence
  SAMD9L targeting guide sequence portion
aaaaaguuauaaugaaaggag

SEQ ID NO: 12838 - RNA, 21 nt, Artificial Sequence
  SAMD9L targeting guide sequence portion
aaaacuacuaaauauuccugc

SEQ ID NO: 12839 - RNA, 21 nt, Artificial Sequence
  SAMD9L targeting guide sequence portion
aaaagaaauaggaucaggccu

SEQ ID NO: 12840 - RNA, 21 nt, Artificial Sequence
  SAMD9L targeting guide sequence portion
aaaaguuauaaugaaaggagg

SEQ ID NO: 12841 - RNA, 21 nt, Artificial Sequence
  SAMD9L targeting guide sequence portion
aaacaguugccucccucuucu

SEQ ID NO: 12842 - RNA, 21 nt, Artificial Sequence
  SAMD9L targeting guide sequence portion
aaacccaauucuucuugucau

SEQ ID NO: 12843 - RNA, 21 nt, Artificial Sequence
  SAMD9L targeting guide sequence portion
aaacuacuaaauauuccugcu

SEQ ID NO: 12844 - RNA, 21 nt, Artificial Sequence
  SAMD9L targeting guide sequence portion
aaacuccccugcuggacuaua

SEQ ID NO: 12845 - RNA, 21 nt, Artificial Sequence
  SAMD9L targeting guide sequence portion
aaagaaauaggaucaggccua

SEQ ID NO: 12846 - RNA, 21 nt, Artificial Sequence
  SAMD9L targeting guide sequence portion
aaagagggacauguucuggac

SEQ ID NO: 12847 - RNA, 21 nt, Artificial Sequence
  SAMD9L targeting guide sequence portion
aaagauaauuaugguuagcag

SEQ ID NO: 12848 - RNA, 21 nt, Artificial Sequence
  SAMD9L targeting guide sequence portion
aaagcugugucugcugcugac

SEQ ID NO: 12849 - RNA, 21 nt, Artificial Sequence
  SAMD9L targeting guide sequence portion
aaaggaggaaaaacuacuaaa

SEQ ID NO: 12850 - RNA, 21 nt, Artificial Sequence
  SAMD9L targeting guide sequence portion
aaaggcuugauguagagaaaa

SEQ ID NO: 12851 - RNA, 21 nt, Artificial Sequence
  SAMD9L targeting guide sequence portion
aaaguuauaaugaaaggagga

SEQ ID NO: 12852 - RNA, 21 nt, Artificial Sequence
  SAMD9L targeting guide sequence portion
aaauaggaucaggccuauguc

SEQ ID NO: 12853 - RNA, 21 nt, Artificial Sequence
  SAMD9L targeting guide sequence portion
aaauauaggccagaagaaccc

SEQ ID NO: 12854 - RNA, 21 nt, Artificial Sequence
  SAMD9L targeting guide sequence portion
aaauauuccugcuaaccauaa

SEQ ID NO: 12855 - RNA, 21 nt, Artificial Sequence
  SAMD9L targeting guide sequence portion
aaaugggggcuaaggagaagg

SEQ ID NO: 12856 - RNA, 21 nt, Artificial Sequence
  SAMD9L targeting guide sequence portion
aaauguuauaguccagcaggg

SEQ ID NO: 12857 - RNA, 21 nt, Artificial Sequence
  SAMD9L targeting guide sequence portion
aacaacuuggggaguauagcc

SEQ ID NO: 12858 - RNA, 21 nt, Artificial Sequence
  SAMD9L targeting guide sequence portion
aacaggaucucccaaguggcu

SEQ ID NO: 12859 - RNA, 21 nt, Artificial Sequence
  SAMD9L targeting guide sequence portion
aacaguugccucccucuucug

SEQ ID NO: 12860 - RNA, 21 nt, Artificial Sequence
  SAMD9L targeting guide sequence portion
aacaugucccucuuucugaaa

SEQ ID NO: 12861 - RNA, 21 nt, Artificial Sequence
  SAMD9L targeting guide sequence portion
aacauuuaguaagacauaacu

SEQ ID NO: 12862 - RNA, 21 nt, Artificial Sequence
  SAMD9L targeting guide sequence portion
aaccauaauuaucuuuagagu

SEQ ID NO: 12863 - RNA, 21 nt, Artificial Sequence
  SAMD9L targeting guide sequence portion
aacccaauucuucuugucauc

SEQ ID NO: 12864 - RNA, 21 nt, Artificial Sequence
  SAMD9L targeting guide sequence portion
aacccugauagagcauagacu

SEQ ID NO: 12865 - RNA, 21 nt, Artificial Sequence
  SAMD9L targeting guide sequence portion
aacgcucacaugguccagaac

SEQ ID NO: 12866 - RNA, 21 nt, Artificial Sequence
  SAMD9L targeting guide sequence portion
aacuaaaggcuugauguagag

SEQ ID NO: 12867 - RNA, 21 nt, Artificial Sequence
  SAMD9L targeting guide sequence portion
aacuacuaaauauuccugcua

SEQ ID NO: 12868 - RNA, 21 nt, Artificial Sequence
  SAMD9L targeting guide sequence portion
aacuccccugcuggacuauaa

SEQ ID NO: 12869 - RNA, 21 nt, Artificial Sequence
  SAMD9L targeting guide sequence portion
aacucuaaagauaauuauggu

SEQ ID NO: 12870 - RNA, 21 nt, Artificial Sequence
  SAMD9L targeting guide sequence portion
aacuguuuggagcagggucag

SEQ ID NO: 12871 - RNA, 21 nt, Artificial Sequence
  SAMD9L targeting guide sequence portion
aacuuagauauucuggacucc

SEQ ID NO: 12872 - RNA, 21 nt, Artificial Sequence
  SAMD9L targeting guide sequence portion
aacuuggggaguauagccacu

SEQ ID NO: 12873 - RNA, 21 nt, Artificial Sequence
  SAMD9L targeting guide sequence portion
aacuuuuuucucuacaucaag

SEQ ID NO: 12874 - RNA, 21 nt, Artificial Sequence
  SAMD9L targeting guide sequence portion
aagaaauaggaucaggccuau

SEQ ID NO: 12875 - RNA, 21 nt, Artificial Sequence
  SAMD9L targeting guide sequence portion
aagaacccugauagagcauag

SEQ ID NO: 12876 - RNA, 21 nt, Artificial Sequence
  SAMD9L targeting guide sequence portion
aagaagaauuggguuuggagu

SEQ ID NO: 12877 - RNA, 21 nt, Artificial Sequence
  SAMD9L targeting guide sequence portion
aagaagucuaugcucuaucag

SEQ ID NO: 12878 - RNA, 21 nt, Artificial Sequence
  SAMD9L targeting guide sequence portion
aagaauuggguuuggagucca

SEQ ID NO: 12879 - RNA, 21 nt, Artificial Sequence
  SAMD9L targeting guide sequence portion
aagacauaacuaaaggcuuga

SEQ ID NO: 12880 - RNA, 21 nt, Artificial Sequence
  SAMD9L targeting guide sequence portion
aagagggacauguucuggacc

SEQ ID NO: 12881 - RNA, 21 nt, Artificial Sequence
  SAMD9L targeting guide sequence portion
aagagggaggcaacuguuugg

SEQ ID NO: 12882 - RNA, 21 nt, Artificial Sequence
  SAMD9L targeting guide sequence portion
aagauaauuaugguuagcagg

SEQ ID NO: 12883 - RNA, 21 nt, Artificial Sequence
  SAMD9L targeting guide sequence portion
aagauaccugguggugggguc

SEQ ID NO: 12884 - RNA, 21 nt, Artificial Sequence
  SAMD9L targeting guide sequence portion
aagccuuuaguuaugucuuac

SEQ ID NO: 12885 - RNA, 21 nt, Artificial Sequence
  SAMD9L targeting guide sequence portion
aagcucucuaagauaccuggu

SEQ ID NO: 12886 - RNA, 21 nt, Artificial Sequence
  SAMD9L targeting guide sequence portion
aagcugugucugcugcugacc

SEQ ID NO: 12887 - RNA, 21 nt, Artificial Sequence
  SAMD9L targeting guide sequence portion
aaggaagcucucuaagauacc

SEQ ID NO: 12888 - RNA, 21 nt, Artificial Sequence
  SAMD9L targeting guide sequence portion
aaggagaaggaagcucucuaa

SEQ ID NO: 12889 - RNA, 21 nt, Artificial Sequence
  SAMD9L targeting guide sequence portion
aaggaggaaaaacuacuaaau

SEQ ID NO: 12890 - RNA, 21 nt, Artificial Sequence
  SAMD9L targeting guide sequence portion
aaggcuugauguagagaaaaa

SEQ ID NO: 12891 - RNA, 21 nt, Artificial Sequence
  SAMD9L targeting guide sequence portion
aagucuaugcucuaucagggu

SEQ ID NO: 12892 - RNA, 21 nt, Artificial Sequence
  SAMD9L targeting guide sequence portion
aaguggcuauacuccccaagu

SEQ ID NO: 12893 - RNA, 21 nt, Artificial Sequence
  SAMD9L targeting guide sequence portion
aaguuacauuacaaagagaua

SEQ ID NO: 12894 - RNA, 21 nt, Artificial Sequence
  SAMD9L targeting guide sequence portion
aaguuauaaugaaaggaggaa

SEQ ID NO: 12895 - RNA, 21 nt, Artificial Sequence
  SAMD9L targeting guide sequence portion
aaguuguucauaggccugggg

SEQ ID NO: 12896 - RNA, 21 nt, Artificial Sequence
  SAMD9L targeting guide sequence portion
aauaauucugaccccaccacc

SEQ ID NO: 12897 - RNA, 21 nt, Artificial Sequence
  SAMD9L targeting guide sequence portion
aauaggaucaggccuaugucc

SEQ ID NO: 12898 - RNA, 21 nt, Artificial Sequence
  SAMD9L targeting guide sequence portion
aauauaggccagaagaacccu

SEQ ID NO: 12899 - RNA, 21 nt, Artificial Sequence
  SAMD9L targeting guide sequence portion
aauaucuaaguuacauuacaa

SEQ ID NO: 12900 - RNA, 21 nt, Artificial Sequence
  SAMD9L targeting guide sequence portion
aauauuccugcuaaccauaau

SEQ ID NO: 12901 - RNA, 21 nt, Artificial Sequence
  SAMD9L targeting guide sequence portion
aauauuuaguaguuuuuccuc

SEQ ID NO: 12902 - RNA, 21 nt, Artificial Sequence
  SAMD9L targeting guide sequence portion
aaucugggcaacgcucacaug

SEQ ID NO: 12903 - RNA, 21 nt, Artificial Sequence
  SAMD9L targeting guide sequence portion
aaugaaaggaggaaaaacuac

SEQ ID NO: 12904 - RNA, 21 nt, Artificial Sequence
  SAMD9L targeting guide sequence portion
aaugggggcuaaggagaagga

SEQ ID NO: 12905 - RNA, 21 nt, Artificial Sequence
  SAMD9L targeting guide sequence portion
aauguaacuuagauauucugg

SEQ ID NO: 12906 - RNA, 21 nt, Artificial Sequence
  SAMD9L targeting guide sequence portion
aauguuauaguccagcagggg

SEQ ID NO: 12907 - RNA, 21 nt, Artificial Sequence
  SAMD9L targeting guide sequence portion
aauuaucuuuagaguuaauaa

SEQ ID NO: 12908 - RNA, 21 nt, Artificial Sequence
  SAMD9L targeting guide sequence portion
aauuaugguuagcaggaauau

SEQ ID NO: 12909 - RNA, 21 nt, Artificial Sequence
  SAMD9L targeting guide sequence portion
aauuauuaacucuaaagauaa

SEQ ID NO: 12910 - RNA, 21 nt, Artificial Sequence
  SAMD9L targeting guide sequence portion
aauucugaccccaccaccagg

SEQ ID NO: 12911 - RNA, 21 nt, Artificial Sequence
  SAMD9L targeting guide sequence portion
aauucuucuugucaucaagaa

SEQ ID NO: 12912 - RNA, 21 nt, Artificial Sequence
  SAMD9L targeting guide sequence portion
aauuggguuuggaguccagaa

SEQ ID NO: 12913 - RNA, 21 nt, Artificial Sequence
  SAMD9L targeting guide sequence portion
acaacuuggggaguauagcca

SEQ ID NO: 12914 - RNA, 21 nt, Artificial Sequence
  SAMD9L targeting guide sequence portion
acaagaagaauuggguuugga

SEQ ID NO: 12915 - RNA, 21 nt, Artificial Sequence
  SAMD9L targeting guide sequence portion
acacagcuuucagaaagaggg

SEQ ID NO: 12916 - RNA, 21 nt, Artificial Sequence
  SAMD9L targeting guide sequence portion
acagcuuucagaaagagggac

SEQ ID NO: 12917 - RNA, 21 nt, Artificial Sequence
  SAMD9L targeting guide sequence portion
acaggaucucccaaguggcua

SEQ ID NO: 12918 - RNA, 21 nt, Artificial Sequence
  SAMD9L targeting guide sequence portion
acaguaacaggaucucccaag

SEQ ID NO: 12919 - RNA, 21 nt, Artificial Sequence
  SAMD9L targeting guide sequence portion
acaguugccucccucuucugc

SEQ ID NO: 12920 - RNA, 21 nt, Artificial Sequence
  SAMD9L targeting guide sequence portion
acauaacuaaaggcuugaugu

SEQ ID NO: 12921 - RNA, 21 nt, Artificial Sequence
  SAMD9L targeting guide sequence portion
acauaggccugauccuauuuc

SEQ ID NO: 12922 - RNA, 21 nt, Artificial Sequence
  SAMD9L targeting guide sequence portion
acaucaagccuuuaguuaugu

SEQ ID NO: 12923 - RNA, 21 nt, Artificial Sequence
  SAMD9L targeting guide sequence portion
acaucuuuguaucucuuugua

SEQ ID NO: 12924 - RNA, 21 nt, Artificial Sequence
  SAMD9L targeting guide sequence portion
acaugguccagaacauguccc

SEQ ID NO: 12925 - RNA, 21 nt, Artificial Sequence
  SAMD9L targeting guide sequence portion
acaugucccucuuucugaaag

SEQ ID NO: 12926 - RNA, 21 nt, Artificial Sequence
  SAMD9L targeting guide sequence portion
acauguucuggaccaugugag

SEQ ID NO: 12927 - RNA, 21 nt, Artificial Sequence
  SAMD9L targeting guide sequence portion
acauuuaguaagacauaacua

SEQ ID NO: 12928 - RNA, 21 nt, Artificial Sequence
  SAMD9L targeting guide sequence portion
accaccagguaucuuagagag

SEQ ID NO: 12929 - RNA, 21 nt, Artificial Sequence
  SAMD9L targeting guide sequence portion
accagguaucuuagagagcuu

SEQ ID NO: 12930 - RNA, 21 nt, Artificial Sequence
  SAMD9L targeting guide sequence portion
accaguccauacaguaacagg

SEQ ID NO: 12931 - RNA, 21 nt, Artificial Sequence
  SAMD9L targeting guide sequence portion
accauaauuaucuuuagaguu

SEQ ID NO: 12932 - RNA, 21 nt, Artificial Sequence
  SAMD9L targeting guide sequence portion
accaugugagcguugcccaga

SEQ ID NO: 12933 - RNA, 21 nt, Artificial Sequence
  SAMD9L targeting guide sequence portion
acccaauucuucuugucauca

SEQ ID NO: 12934 - RNA, 21 nt, Artificial Sequence
  SAMD9L targeting guide sequence portion
accccaccaccagguaucuua

SEQ ID NO: 12935 - RNA, 21 nt, Artificial Sequence
  SAMD9L targeting guide sequence portion
acccugauagagcauagacuu

SEQ ID NO: 12936 - RNA, 21 nt, Artificial Sequence
  SAMD9L targeting guide sequence portion
acccugcuccaaacaguugcc

SEQ ID NO: 12937 - RNA, 21 nt, Artificial Sequence
  SAMD9L targeting guide sequence portion
accuggugguggggucagaau

SEQ ID NO: 12938 - RNA, 21 nt, Artificial Sequence
  SAMD9L targeting guide sequence portion
acgcucacaugguccagaaca

SEQ ID NO: 12939 - RNA, 21 nt, Artificial Sequence
  SAMD9L targeting guide sequence portion
acuaaaggcuugauguagaga

SEQ ID NO: 12940 - RNA, 21 nt, Artificial Sequence
  SAMD9L targeting guide sequence portion
acuaaauauuccugcuaacca

SEQ ID NO: 12941 - RNA, 21 nt, Artificial Sequence
  SAMD9L targeting guide sequence portion
acuaaauguuauaguccagca

SEQ ID NO: 12942 - RNA, 21 nt, Artificial Sequence
  SAMD9L targeting guide sequence portion
acuacuaaauauuccugcuaa

SEQ ID NO: 12943 - RNA, 21 nt, Artificial Sequence
  SAMD9L targeting guide sequence portion
acuauaacauuuaguaagaca

SEQ ID NO: 12944 - RNA, 21 nt, Artificial Sequence
  SAMD9L targeting guide sequence portion
acuccaaacccaauucuucuu

SEQ ID NO: 12945 - RNA, 21 nt, Artificial Sequence
  SAMD9L targeting guide sequence portion
acuccccaaguuguucauagg

SEQ ID NO: 12946 - RNA, 21 nt, Artificial Sequence
  SAMD9L targeting guide sequence portion
acuccccugcuggacuauaac

SEQ ID NO: 12947 - RNA, 21 nt, Artificial Sequence
  SAMD9L targeting guide sequence portion
acucuaaagauaauuaugguu

SEQ ID NO: 12948 - RNA, 21 nt, Artificial Sequence
  SAMD9L targeting guide sequence portion
acugcagaagagggaggcaac

SEQ ID NO: 12949 - RNA, 21 nt, Artificial Sequence
  SAMD9L targeting guide sequence portion
acugguggacugcagaagagg

SEQ ID NO: 12950 - RNA, 21 nt, Artificial Sequence
  SAMD9L targeting guide sequence portion
acuguauggacugguggacug

SEQ ID NO: 12951 - RNA, 21 nt, Artificial Sequence
  SAMD9L targeting guide sequence portion
acuguuuggagcagggucagc

SEQ ID NO: 12952 - RNA, 21 nt, Artificial Sequence
  SAMD9L targeting guide sequence portion
acuuagauauucuggacucca

SEQ ID NO: 12953 - RNA, 21 nt, Artificial Sequence
  SAMD9L targeting guide sequence portion
acuucuugaugacaagaagaa

SEQ ID NO: 12954 - RNA, 21 nt, Artificial Sequence
  SAMD9L targeting guide sequence portion
acuugggagauccuguuacug

SEQ ID NO: 12955 - RNA, 21 nt, Artificial Sequence
  SAMD9L targeting guide sequence portion
acuuggggaguauagccacuu

SEQ ID NO: 12956 - RNA, 21 nt, Artificial Sequence
  SAMD9L targeting guide sequence portion
acuuuuuucucuacaucaagc

SEQ ID NO: 12957 - RNA, 21 nt, Artificial Sequence
  SAMD9L targeting guide sequence portion
agaaaaaaguuauaaugaaag

SEQ ID NO: 12958 - RNA, 21 nt, Artificial Sequence
  SAMD9L targeting guide sequence portion
agaaagagggacauguucugg

SEQ ID NO: 12959 - RNA, 21 nt, Artificial Sequence
  SAMD9L targeting guide sequence portion
agaaauaggaucaggccuaug

SEQ ID NO: 12960 - RNA, 21 nt, Artificial Sequence
  SAMD9L targeting guide sequence portion
agaaauauaggccagaagaac

SEQ ID NO: 12961 - RNA, 21 nt, Artificial Sequence
  SAMD9L targeting guide sequence portion
agaacaugucccucuuucuga

SEQ ID NO: 12962 - RNA, 21 nt, Artificial Sequence
  SAMD9L targeting guide sequence portion
agaacccugauagagcauaga

SEQ ID NO: 12963 - RNA, 21 nt, Artificial Sequence
  SAMD9L targeting guide sequence portion
agaagaacccugauagagcau

SEQ ID NO: 12964 - RNA, 21 nt, Artificial Sequence
  SAMD9L targeting guide sequence portion
agaagaauuggguuuggaguc

SEQ ID NO: 12965 - RNA, 21 nt, Artificial Sequence
  SAMD9L targeting guide sequence portion
agaagagggaggcaacuguuu

SEQ ID NO: 12966 - RNA, 21 nt, Artificial Sequence
  SAMD9L targeting guide sequence portion
agaaggaagcucucuaagaua

SEQ ID NO: 12967 - RNA, 21 nt, Artificial Sequence
  SAMD9L targeting guide sequence portion
agaagucuaugcucuaucagg

SEQ ID NO: 12968 - RNA, 21 nt, Artificial Sequence
  SAMD9L targeting guide sequence portion
agaauaucuaaguuacauuac

SEQ ID NO: 12969 - RNA, 21 nt, Artificial Sequence
  SAMD9L targeting guide sequence portion
agaauuauuaacucuaaagau

SEQ ID NO: 12970 - RNA, 21 nt, Artificial Sequence
  SAMD9L targeting guide sequence portion
agaauuggguuuggaguccag

SEQ ID NO: 12971 - RNA, 21 nt, Artificial Sequence
  SAMD9L targeting guide sequence portion
agacacagcuuucagaaagag

SEQ ID NO: 12972 - RNA, 21 nt, Artificial Sequence
  SAMD9L targeting guide sequence portion
agacauaacuaaaggcuugau

SEQ ID NO: 12973 - RNA, 21 nt, Artificial Sequence
  SAMD9L targeting guide sequence portion
agacuucuugaugacaagaag

SEQ ID NO: 12974 - RNA, 21 nt, Artificial Sequence
  SAMD9L targeting guide sequence portion
agagaaaaaaguuauaaugaa

SEQ ID NO: 12975 - RNA, 21 nt, Artificial Sequence
  SAMD9L targeting guide sequence portion
agagagcuuccuucuccuuag

SEQ ID NO: 12976 - RNA, 21 nt, Artificial Sequence
  SAMD9L targeting guide sequence portion
agagcauagacuucuugauga

SEQ ID NO: 12977 - RNA, 21 nt, Artificial Sequence
  SAMD9L targeting guide sequence portion
agagcuuccuucuccuuagcc

SEQ ID NO: 12978 - RNA, 21 nt, Artificial Sequence
  SAMD9L targeting guide sequence portion
agagggacauguucuggacca

SEQ ID NO: 12979 - RNA, 21 nt, Artificial Sequence
  SAMD9L targeting guide sequence portion
agagggaggcaacuguuugga

SEQ ID NO: 12980 - RNA, 21 nt, Artificial Sequence
  SAMD9L targeting guide sequence portion
agaguuaauaauucugacccc

SEQ ID NO: 12981 - RNA, 21 nt, Artificial Sequence
  SAMD9L targeting guide sequence portion
agauaauuaugguuagcagga

SEQ ID NO: 12982 - RNA, 21 nt, Artificial Sequence
  SAMD9L targeting guide sequence portion
agauaccugguggugggguca

SEQ ID NO: 12983 - RNA, 21 nt, Artificial Sequence
  SAMD9L targeting guide sequence portion
agauauucuggacuccaaacc

SEQ ID NO: 12984 - RNA, 21 nt, Artificial Sequence
  SAMD9L targeting guide sequence portion
agauccuguuacuguauggac

SEQ ID NO: 12985 - RNA, 21 nt, Artificial Sequence
  SAMD9L targeting guide sequence portion
agauucauagaaauauaggcc

SEQ ID NO: 12986 - RNA, 21 nt, Artificial Sequence
  SAMD9L targeting guide sequence portion
agcagacacagcuuucagaaa

SEQ ID NO: 12987 - RNA, 21 nt, Artificial Sequence
  SAMD9L targeting guide sequence portion
agcagcagacacagcuuucag

SEQ ID NO: 12988 - RNA, 21 nt, Artificial Sequence
  SAMD9L targeting guide sequence portion
agcaggaauauuuaguaguuu

SEQ ID NO: 12989 - RNA, 21 nt, Artificial Sequence
  SAMD9L targeting guide sequence portion
agcaggggaguuuaaaagaaa

SEQ ID NO: 12990 - RNA, 21 nt, Artificial Sequence
  SAMD9L targeting guide sequence portion
agcagggucagcagcagacac

SEQ ID NO: 12991 - RNA, 21 nt, Artificial Sequence
  SAMD9L targeting guide sequence portion
agcauagacuucuugaugaca

SEQ ID NO: 12992 - RNA, 21 nt, Artificial Sequence
  SAMD9L targeting guide sequence portion
agccacuugggagauccuguu

SEQ ID NO: 12993 - RNA, 21 nt, Artificial Sequence
  SAMD9L targeting guide sequence portion
agccuuuaguuaugucuuacu

SEQ ID NO: 12994 - RNA, 21 nt, Artificial Sequence
  SAMD9L targeting guide sequence portion
agcguugcccagauucauaga

SEQ ID NO: 12995 - RNA, 21 nt, Artificial Sequence
  SAMD9L targeting guide sequence portion
agcucucuaagauaccuggug

SEQ ID NO: 12996 - RNA, 21 nt, Artificial Sequence
  SAMD9L targeting guide sequence portion
agcugugucugcugcugaccc

SEQ ID NO: 12997 - RNA, 21 nt, Artificial Sequence
  SAMD9L targeting guide sequence portion
agcuuccuucuccuuagcccc

SEQ ID NO: 12998 - RNA, 21 nt, Artificial Sequence
  SAMD9L targeting guide sequence portion
agcuuucagaaagagggacau

SEQ ID NO: 12999 - RNA, 21 nt, Artificial Sequence
  SAMD9L targeting guide sequence portion
aggaaaaacuacuaaauauuc

SEQ ID NO: 13000 - RNA, 21 nt, Artificial Sequence
  SAMD9L targeting guide sequence portion
aggaagcucucuaagauaccu

SEQ ID NO: 13001 - RNA, 21 nt, Artificial Sequence
  SAMD9L targeting guide sequence portion
aggaauauuuaguaguuuuuc

SEQ ID NO: 13002 - RNA, 21 nt, Artificial Sequence
  SAMD9L targeting guide sequence portion
aggagaaggaagcucucuaag

SEQ ID NO: 13003 - RNA, 21 nt, Artificial Sequence
  SAMD9L targeting guide sequence portion
aggaggaaaaacuacuaaaua

SEQ ID NO: 13004 - RNA, 21 nt, Artificial Sequence
  SAMD9L targeting guide sequence portion
aggaucaggccuaugucccca

SEQ ID NO: 13005 - RNA, 21 nt, Artificial Sequence
  SAMD9L targeting guide sequence portion
aggaucucccaaguggcuaua

SEQ ID NO: 13006 - RNA, 21 nt, Artificial Sequence
  SAMD9L targeting guide sequence portion
aggcaacuguuuggagcaggg

SEQ ID NO: 13007 - RNA, 21 nt, Artificial Sequence
  SAMD9L targeting guide sequence portion
aggccagaagaacccugauag

SEQ ID NO: 13008 - RNA, 21 nt, Artificial Sequence
  SAMD9L targeting guide sequence portion
aggccuaugaacaacuugggg

SEQ ID NO: 13009 - RNA, 21 nt, Artificial Sequence
  SAMD9L targeting guide sequence portion
aggccuauguccccaggccua

SEQ ID NO: 13010 - RNA, 21 nt, Artificial Sequence
  SAMD9L targeting guide sequence portion
aggccugauccuauuucuuuu

SEQ ID NO: 13011 - RNA, 21 nt, Artificial Sequence
  SAMD9L targeting guide sequence portion
aggccuggggacauaggccug

SEQ ID NO: 13012 - RNA, 21 nt, Artificial Sequence
  SAMD9L targeting guide sequence portion
aggcuugauguagagaaaaaa

SEQ ID NO: 13013 - RNA, 21 nt, Artificial Sequence
  SAMD9L targeting guide sequence portion
agggacauguucuggaccaug

SEQ ID NO: 13014 - RNA, 21 nt, Artificial Sequence
  SAMD9L targeting guide sequence portion
agggaggcaacuguuuggagc

SEQ ID NO: 13015 - RNA, 21 nt, Artificial Sequence
  SAMD9L targeting guide sequence portion
aggggaguuuaaaagaaauag

SEQ ID NO: 13016 - RNA, 21 nt, Artificial Sequence
  SAMD9L targeting guide sequence portion
agggucagcagcagacacagc

SEQ ID NO: 13017 - RNA, 21 nt, Artificial Sequence
  SAMD9L targeting guide sequence portion
aggguucuucuggccuauauu

SEQ ID NO: 13018 - RNA, 21 nt, Artificial Sequence
  SAMD9L targeting guide sequence portion
agguaucuuagagagcuuccu

SEQ ID NO: 13019 - RNA, 21 nt, Artificial Sequence
  SAMD9L targeting guide sequence portion
aguaacaggaucucccaagug

SEQ ID NO: 13020 - RNA, 21 nt, Artificial Sequence
  SAMD9L targeting guide sequence portion
aguaagacauaacuaaaggcu

SEQ ID NO: 13021 - RNA, 21 nt, Artificial Sequence
  SAMD9L targeting guide sequence portion
aguaguuuuuccuccuuucau

SEQ ID NO: 13022 - RNA, 21 nt, Artificial Sequence
  SAMD9L targeting guide sequence portion
aguauagccacuugggagauc

SEQ ID NO: 13023 - RNA, 21 nt, Artificial Sequence
  SAMD9L targeting guide sequence portion
aguccaccaguccauacagua

SEQ ID NO: 13024 - RNA, 21 nt, Artificial Sequence
  SAMD9L targeting guide sequence portion
aguccagaauaucuaaguuac

SEQ ID NO: 13025 - RNA, 21 nt, Artificial Sequence
  SAMD9L targeting guide sequence portion
aguccagcaggggaguuuaaa

SEQ ID NO: 13026 - RNA, 21 nt, Artificial Sequence
  SAMD9L targeting guide sequence portion
aguccauacaguaacaggauc

SEQ ID NO: 13027 - RNA, 21 nt, Artificial Sequence
  SAMD9L targeting guide sequence portion
agucuaugcucuaucaggguu

SEQ ID NO: 13028 - RNA, 21 nt, Artificial Sequence
  SAMD9L targeting guide sequence portion
aguggcuauacuccccaaguu

SEQ ID NO: 13029 - RNA, 21 nt, Artificial Sequence
  SAMD9L targeting guide sequence portion
aguuaauaauucugaccccac

SEQ ID NO: 13030 - RNA, 21 nt, Artificial Sequence
  SAMD9L targeting guide sequence portion
aguuacauuacaaagagauac

SEQ ID NO: 13031 - RNA, 21 nt, Artificial Sequence
  SAMD9L targeting guide sequence portion
aguuauaaugaaaggaggaaa

SEQ ID NO: 13032 - RNA, 21 nt, Artificial Sequence
  SAMD9L targeting guide sequence portion
aguuaugucuuacuaaauguu

SEQ ID NO: 13033 - RNA, 21 nt, Artificial Sequence
  SAMD9L targeting guide sequence portion
aguugccucccucuucugcag

SEQ ID NO: 13034 - RNA, 21 nt, Artificial Sequence
  SAMD9L targeting guide sequence portion
aguuguucauaggccugggga

SEQ ID NO: 13035 - RNA, 21 nt, Artificial Sequence
  SAMD9L targeting guide sequence portion
aguuuaaaagaaauaggauca

SEQ ID NO: 13036 - RNA, 21 nt, Artificial Sequence
  SAMD9L targeting guide sequence portion
aguuuuuccuccuuucauuau

SEQ ID NO: 13037 - RNA, 21 nt, Artificial Sequence
  SAMD9L targeting guide sequence portion
auaacauuuaguaagacauaa

SEQ ID NO: 13038 - RNA, 21 nt, Artificial Sequence
  SAMD9L targeting guide sequence portion
auaacuaaaggcuugauguag

SEQ ID NO: 13039 - RNA, 21 nt, Artificial Sequence
  SAMD9L targeting guide sequence portion
auaacuuuuuucucuacauca

SEQ ID NO: 13040 - RNA, 21 nt, Artificial Sequence
  SAMD9L targeting guide sequence portion
auaaugaaaggaggaaaaacu

SEQ ID NO: 13041 - RNA, 21 nt, Artificial Sequence
  SAMD9L targeting guide sequence portion
auaauuaucuuuagaguuaau

SEQ ID NO: 13042 - RNA, 21 nt, Artificial Sequence
  SAMD9L targeting guide sequence portion
auaauuaugguuagcaggaau

SEQ ID NO: 13043 - RNA, 21 nt, Artificial Sequence
  SAMD9L targeting guide sequence portion
auaauucugaccccaccacca

SEQ ID NO: 13044 - RNA, 21 nt, Artificial Sequence
  SAMD9L targeting guide sequence portion
auacaguaacaggaucuccca

SEQ ID NO: 13045 - RNA, 21 nt, Artificial Sequence
  SAMD9L targeting guide sequence portion
auaccuggugguggggucaga

SEQ ID NO: 13046 - RNA, 21 nt, Artificial Sequence
  SAMD9L targeting guide sequence portion
auacuccccaaguuguucaua

SEQ ID NO: 13047 - RNA, 21 nt, Artificial Sequence
  SAMD9L targeting guide sequence portion
auagaaauauaggccagaaga

SEQ ID NO: 13048 - RNA, 21 nt, Artificial Sequence
  SAMD9L targeting guide sequence portion
auagacuucuugaugacaaga

SEQ ID NO: 13049 - RNA, 21 nt, Artificial Sequence
  SAMD9L targeting guide sequence portion
auagagcauagacuucuugau

SEQ ID NO: 13050 - RNA, 21 nt, Artificial Sequence
  SAMD9L targeting guide sequence portion
auagccacuugggagauccug

SEQ ID NO: 13051 - RNA, 21 nt, Artificial Sequence
  SAMD9L targeting guide sequence portion
auaggaucaggccuauguccc

SEQ ID NO: 13052 - RNA, 21 nt, Artificial Sequence
  SAMD9L targeting guide sequence portion
auaggccagaagaacccugau

SEQ ID NO: 13053 - RNA, 21 nt, Artificial Sequence
  SAMD9L targeting guide sequence portion
auaggccugauccuauuucuu

SEQ ID NO: 13054 - RNA, 21 nt, Artificial Sequence
  SAMD9L targeting guide sequence portion
auaggccuggggacauaggcc

SEQ ID NO: 13055 - RNA, 21 nt, Artificial Sequence
  SAMD9L targeting guide sequence portion
auaguccagcaggggaguuua

SEQ ID NO: 13056 - RNA, 21 nt, Artificial Sequence
  SAMD9L targeting guide sequence portion
auauaggccagaagaacccug

SEQ ID NO: 13057 - RNA, 21 nt, Artificial Sequence
  SAMD9L targeting guide sequence portion
auaucuaaguuacauuacaaa

SEQ ID NO: 13058 - RNA, 21 nt, Artificial Sequence
  SAMD9L targeting guide sequence portion
auauuccugcuaaccauaauu

SEQ ID NO: 13059 - RNA, 21 nt, Artificial Sequence
  SAMD9L targeting guide sequence portion
auauucuggacuccaaaccca

SEQ ID NO: 13060 - RNA, 21 nt, Artificial Sequence
  SAMD9L targeting guide sequence portion
auauuuaguaguuuuuccucc

SEQ ID NO: 13061 - RNA, 21 nt, Artificial Sequence
  SAMD9L targeting guide sequence portion
auauuucuaugaaucugggca

SEQ ID NO: 13062 - RNA, 21 nt, Artificial Sequence
  SAMD9L targeting guide sequence portion
aucaagaagucuaugcucuau

SEQ ID NO: 13063 - RNA, 21 nt, Artificial Sequence
  SAMD9L targeting guide sequence portion
aucaagccuuuaguuaugucu

SEQ ID NO: 13064 - RNA, 21 nt, Artificial Sequence
  SAMD9L targeting guide sequence portion
aucaggccuauguccccaggc

SEQ ID NO: 13065 - RNA, 21 nt, Artificial Sequence
  SAMD9L targeting guide sequence portion
aucaggguucuucuggccuau

SEQ ID NO: 13066 - RNA, 21 nt, Artificial Sequence
  SAMD9L targeting guide sequence portion
auccuauuucuuuuaaacucc

SEQ ID NO: 13067 - RNA, 21 nt, Artificial Sequence
  SAMD9L targeting guide sequence portion
auccuguuacuguauggacug

SEQ ID NO: 13068 - RNA, 21 nt, Artificial Sequence
  SAMD9L targeting guide sequence portion
aucuaaguuacauuacaaaga

SEQ ID NO: 13069 - RNA, 21 nt, Artificial Sequence
  SAMD9L targeting guide sequence portion
aucucccaaguggcuauacuc

SEQ ID NO: 13070 - RNA, 21 nt, Artificial Sequence
  SAMD9L targeting guide sequence portion
aucucuuuguaauguaacuua

SEQ ID NO: 13071 - RNA, 21 nt, Artificial Sequence
  SAMD9L targeting guide sequence portion
aucugggcaacgcucacaugg

SEQ ID NO: 13072 - RNA, 21 nt, Artificial Sequence
  SAMD9L targeting guide sequence portion
aucuuagagagcuuccuucuc

SEQ ID NO: 13073 - RNA, 21 nt, Artificial Sequence
  SAMD9L targeting guide sequence portion
aucuuuagaguuaauaauucu

SEQ ID NO: 13074 - RNA, 21 nt, Artificial Sequence
  SAMD9L targeting guide sequence portion
aucuuuguaucucuuuguaau

SEQ ID NO: 13075 - RNA, 21 nt, Artificial Sequence
  SAMD9L targeting guide sequence portion
augaaaggaggaaaaacuacu

SEQ ID NO: 13076 - RNA, 21 nt, Artificial Sequence
  SAMD9L targeting guide sequence portion
augaacaacuuggggaguaua

SEQ ID NO: 13077 - RNA, 21 nt, Artificial Sequence
  SAMD9L targeting guide sequence portion
augaaucugggcaacgcucac

SEQ ID NO: 13078 - RNA, 21 nt, Artificial Sequence
  SAMD9L targeting guide sequence portion
augacaagaagaauuggguuu

SEQ ID NO: 13079 - RNA, 21 nt, Artificial Sequence
  SAMD9L targeting guide sequence portion
augcucuaucaggguucuucu

SEQ ID NO: 13080 - RNA, 21 nt, Artificial Sequence
  SAMD9L targeting guide sequence portion
auggacugguggacugcagaa

SEQ ID NO: 13081 - RNA, 21 nt, Artificial Sequence
  SAMD9L targeting guide sequence portion
augggggcuaaggagaaggaa

SEQ ID NO: 13082 - RNA, 21 nt, Artificial Sequence
  SAMD9L targeting guide sequence portion
augguccagaacaugucccuc

SEQ ID NO: 13083 - RNA, 21 nt, Artificial Sequence
  SAMD9L targeting guide sequence portion
augguuagcaggaauauuuag

SEQ ID NO: 13084 - RNA, 21 nt, Artificial Sequence
  SAMD9L targeting guide sequence portion
auguaacuuagauauucugga

SEQ ID NO: 13085 - RNA, 21 nt, Artificial Sequence
  SAMD9L targeting guide sequence portion
auguagagaaaaaaguuauaa

SEQ ID NO: 13086 - RNA, 21 nt, Artificial Sequence
  SAMD9L targeting guide sequence portion
auguccccaggccuaugaaca

SEQ ID NO: 13087 - RNA, 21 nt, Artificial Sequence
  SAMD9L targeting guide sequence portion
augucccucuuucugaaagcu

SEQ ID NO: 13088 - RNA, 21 nt, Artificial Sequence
  SAMD9L targeting guide sequence portion
augucuuacuaaauguuauag

SEQ ID NO: 13089 - RNA, 21 nt, Artificial Sequence
  SAMD9L targeting guide sequence portion
augugagcguugcccagauuc

SEQ ID NO: 13090 - RNA, 21 nt, Artificial Sequence
  SAMD9L targeting guide sequence portion
auguuauaguccagcagggga

SEQ ID NO: 13091 - RNA, 21 nt, Artificial Sequence
  SAMD9L targeting guide sequence portion
auguucuggaccaugugagcg

SEQ ID NO: 13092 - RNA, 21 nt, Artificial Sequence
  SAMD9L targeting guide sequence portion
auuaacucuaaagauaauuau

SEQ ID NO: 13093 - RNA, 21 nt, Artificial Sequence
  SAMD9L targeting guide sequence portion
auuauaacuuuuuucucuaca

SEQ ID NO: 13094 - RNA, 21 nt, Artificial Sequence
  SAMD9L targeting guide sequence portion
auuaucuuuagaguuaauaau

SEQ ID NO: 13095 - RNA, 21 nt, Artificial Sequence
  SAMD9L targeting guide sequence portion
auuaugguuagcaggaauauu

SEQ ID NO: 13096 - RNA, 21 nt, Artificial Sequence
  SAMD9L targeting guide sequence portion
auuauuaacucuaaagauaau

SEQ ID NO: 13097 - RNA, 21 nt, Artificial Sequence
  SAMD9L targeting guide sequence portion
auucauagaaauauaggccag

SEQ ID NO: 13098 - RNA, 21 nt, Artificial Sequence
  SAMD9L targeting guide sequence portion
auuccugcuaaccauaauuau

SEQ ID NO: 13099 - RNA, 21 nt, Artificial Sequence
  SAMD9L targeting guide sequence portion
auucugaccccaccaccaggu

SEQ ID NO: 13100 - RNA, 21 nt, Artificial Sequence
  SAMD9L targeting guide sequence portion
auucuggacuccaaacccaau

SEQ ID NO: 13101 - RNA, 21 nt, Artificial Sequence
  SAMD9L targeting guide sequence portion
auucuucuugucaucaagaag

SEQ ID NO: 13102 - RNA, 21 nt, Artificial Sequence
  SAMD9L targeting guide sequence portion
auuggguuuggaguccagaau

SEQ ID NO: 13103 - RNA, 21 nt, Artificial Sequence
  SAMD9L targeting guide sequence portion
auuuaguaagacauaacuaaa

SEQ ID NO: 13104 - RNA, 21 nt, Artificial Sequence
  SAMD9L targeting guide sequence portion
auuuaguaguuuuuccuccuu

SEQ ID NO: 13105 - RNA, 21 nt, Artificial Sequence
  SAMD9L targeting guide sequence portion
auuucuaugaaucugggcaac

SEQ ID NO: 13106 - RNA, 21 nt, Artificial Sequence
  SAMD9L targeting guide sequence portion
auuucuuuuaaacuccccugc

SEQ ID NO: 13107 - RNA, 21 nt, Artificial Sequence
  SAMD9L targeting guide sequence portion
caaacaguugccucccucuuc

SEQ ID NO: 13108 - RNA, 21 nt, Artificial Sequence
  SAMD9L targeting guide sequence portion
caaacccaauucuucuuguca

SEQ ID NO: 13109 - RNA, 21 nt, Artificial Sequence
  SAMD9L targeting guide sequence portion
caacgcucacaugguccagaa

SEQ ID NO: 13110 - RNA, 21 nt, Artificial Sequence
  SAMD9L targeting guide sequence portion
caacuguuuggagcaggguca

SEQ ID NO: 13111 - RNA, 21 nt, Artificial Sequence
  SAMD9L targeting guide sequence portion
caacuuggggaguauagccac

SEQ ID NO: 13112 - RNA, 21 nt, Artificial Sequence
  SAMD9L targeting guide sequence portion
caagaagaauuggguuuggag

SEQ ID NO: 13113 - RNA, 21 nt, Artificial Sequence
  SAMD9L targeting guide sequence portion
caagaagucuaugcucuauca

SEQ ID NO: 13114 - RNA, 21 nt, Artificial Sequence
  SAMD9L targeting guide sequence portion
caagccuuuaguuaugucuua

SEQ ID NO: 13115 - RNA, 21 nt, Artificial Sequence
  SAMD9L targeting guide sequence portion
caaguggcuauacuccccaag

SEQ ID NO: 13116 - RNA, 21 nt, Artificial Sequence
  SAMD9L targeting guide sequence portion
caaguuguucauaggccuggg

SEQ ID NO: 13117 - RNA, 21 nt, Artificial Sequence
  SAMD9L targeting guide sequence portion
caauucuucuugucaucaaga

SEQ ID NO: 13118 - RNA, 21 nt, Artificial Sequence
  SAMD9L targeting guide sequence portion
cacagcuuucagaaagaggga

SEQ ID NO: 13119 - RNA, 21 nt, Artificial Sequence
  SAMD9L targeting guide sequence portion
cacaugguccagaacaugucc

SEQ ID NO: 13120 - RNA, 21 nt, Artificial Sequence
  SAMD9L targeting guide sequence portion
caccaccagguaucuuagaga

SEQ ID NO: 13121 - RNA, 21 nt, Artificial Sequence
  SAMD9L targeting guide sequence portion
caccagguaucuuagagagcu

SEQ ID NO: 13122 - RNA, 21 nt, Artificial Sequence
  SAMD9L targeting guide sequence portion
caccaguccauacaguaacag

SEQ ID NO: 13123 - RNA, 21 nt, Artificial Sequence
  SAMD9L targeting guide sequence portion
cacuugggagauccuguuacu

SEQ ID NO: 13124 - RNA, 21 nt, Artificial Sequence
  SAMD9L targeting guide sequence portion
cagaaagagggacauguucug

SEQ ID NO: 13125 - RNA, 21 nt, Artificial Sequence
  SAMD9L targeting guide sequence portion
cagaacaugucccucuuucug

SEQ ID NO: 13126 - RNA, 21 nt, Artificial Sequence
  SAMD9L targeting guide sequence portion
cagaagaacccugauagagca

SEQ ID NO: 13127 - RNA, 21 nt, Artificial Sequence
  SAMD9L targeting guide sequence portion
cagaagagggaggcaacuguu

SEQ ID NO: 13128 - RNA, 21 nt, Artificial Sequence
  SAMD9L targeting guide sequence portion
cagaauaucuaaguuacauua

SEQ ID NO: 13129 - RNA, 21 nt, Artificial Sequence
  SAMD9L targeting guide sequence portion
cagaauuauuaacucuaaaga

SEQ ID NO: 13130 - RNA, 21 nt, Artificial Sequence
  SAMD9L targeting guide sequence portion
cagacacagcuuucagaaaga

SEQ ID NO: 13131 - RNA, 21 nt, Artificial Sequence
  SAMD9L targeting guide sequence portion
cagauucauagaaauauaggc

SEQ ID NO: 13132 - RNA, 21 nt, Artificial Sequence
  SAMD9L targeting guide sequence portion
cagcagacacagcuuucagaa

SEQ ID NO: 13133 - RNA, 21 nt, Artificial Sequence
  SAMD9L targeting guide sequence portion
cagcagcagacacagcuuuca

SEQ ID NO: 13134 - RNA, 21 nt, Artificial Sequence
  SAMD9L targeting guide sequence portion
cagcaggggaguuuaaaagaa

SEQ ID NO: 13135 - RNA, 21 nt, Artificial Sequence
  SAMD9L targeting guide sequence portion
cagcuuucagaaagagggaca

SEQ ID NO: 13136 - RNA, 21 nt, Artificial Sequence
  SAMD9L targeting guide sequence portion
caggaauauuuaguaguuuuu

SEQ ID NO: 13137 - RNA, 21 nt, Artificial Sequence
  SAMD9L targeting guide sequence portion
caggaucucccaaguggcuau

SEQ ID NO: 13138 - RNA, 21 nt, Artificial Sequence
  SAMD9L targeting guide sequence portion
caggccuaugaacaacuuggg

SEQ ID NO: 13139 - RNA, 21 nt, Artificial Sequence
  SAMD9L targeting guide sequence portion
caggccuauguccccaggccu

SEQ ID NO: 13140 - RNA, 21 nt, Artificial Sequence
  SAMD9L targeting guide sequence portion
caggggaguuuaaaagaaaua

SEQ ID NO: 13141 - RNA, 21 nt, Artificial Sequence
  SAMD9L targeting guide sequence portion
cagggucagcagcagacacag

SEQ ID NO: 13142 - RNA, 21 nt, Artificial Sequence
  SAMD9L targeting guide sequence portion
caggguucuucuggccuauau

SEQ ID NO: 13143 - RNA, 21 nt, Artificial Sequence
  SAMD9L targeting guide sequence portion
cagguaucuuagagagcuucc

SEQ ID NO: 13144 - RNA, 21 nt, Artificial Sequence
  SAMD9L targeting guide sequence portion
caguaacaggaucucccaagu

SEQ ID NO: 13145 - RNA, 21 nt, Artificial Sequence
  SAMD9L targeting guide sequence portion
caguccaccaguccauacagu

SEQ ID NO: 13146 - RNA, 21 nt, Artificial Sequence
  SAMD9L targeting guide sequence portion
caguccauacaguaacaggau

SEQ ID NO: 13147 - RNA, 21 nt, Artificial Sequence
  SAMD9L targeting guide sequence portion
caguugccucccucuucugca

SEQ ID NO: 13148 - RNA, 21 nt, Artificial Sequence
  SAMD9L targeting guide sequence portion
cauaacuaaaggcuugaugua

SEQ ID NO: 13149 - RNA, 21 nt, Artificial Sequence
  SAMD9L targeting guide sequence portion
cauaauuaucuuuagaguuaa

SEQ ID NO: 13150 - RNA, 21 nt, Artificial Sequence
  SAMD9L targeting guide sequence portion
cauacaguaacaggaucuccc

SEQ ID NO: 13151 - RNA, 21 nt, Artificial Sequence
  SAMD9L targeting guide sequence portion
cauagaaauauaggccagaag

SEQ ID NO: 13152 - RNA, 21 nt, Artificial Sequence
  SAMD9L targeting guide sequence portion
cauagacuucuugaugacaag

SEQ ID NO: 13153 - RNA, 21 nt, Artificial Sequence
  SAMD9L targeting guide sequence portion
cauaggccugauccuauuucu

SEQ ID NO: 13154 - RNA, 21 nt, Artificial Sequence
  SAMD9L targeting guide sequence portion
cauaggccuggggacauaggc

SEQ ID NO: 13155 - RNA, 21 nt, Artificial Sequence
  SAMD9L targeting guide sequence portion
caucaagaagucuaugcucua

SEQ ID NO: 13156 - RNA, 21 nt, Artificial Sequence
  SAMD9L targeting guide sequence portion
caucaagccuuuaguuauguc

SEQ ID NO: 13157 - RNA, 21 nt, Artificial Sequence
  SAMD9L targeting guide sequence portion
caucuuuguaucucuuuguaa

SEQ ID NO: 13158 - RNA, 21 nt, Artificial Sequence
  SAMD9L targeting guide sequence portion
caugguccagaacaugucccu

SEQ ID NO: 13159 - RNA, 21 nt, Artificial Sequence
  SAMD9L targeting guide sequence portion
caugucccucuuucugaaagc

SEQ ID NO: 13160 - RNA, 21 nt, Artificial Sequence
  SAMD9L targeting guide sequence portion
caugugagcguugcccagauu

SEQ ID NO: 13161 - RNA, 21 nt, Artificial Sequence
  SAMD9L targeting guide sequence portion
cauguucuggaccaugugagc

SEQ ID NO: 13162 - RNA, 21 nt, Artificial Sequence
  SAMD9L targeting guide sequence portion
cauuauaacuuuuuucucuac

SEQ ID NO: 13163 - RNA, 21 nt, Artificial Sequence
  SAMD9L targeting guide sequence portion
cauuuaguaagacauaacuaa

SEQ ID NO: 13164 - RNA, 21 nt, Artificial Sequence
  SAMD9L targeting guide sequence portion
ccaaacaguugccucccucuu

SEQ ID NO: 13165 - RNA, 21 nt, Artificial Sequence
  SAMD9L targeting guide sequence portion
ccaaacccaauucuucuuguc

SEQ ID NO: 13166 - RNA, 21 nt, Artificial Sequence
  SAMD9L targeting guide sequence portion
ccaaguggcuauacuccccaa

SEQ ID NO: 13167 - RNA, 21 nt, Artificial Sequence
  SAMD9L targeting guide sequence portion
ccaaguuguucauaggccugg

SEQ ID NO: 13168 - RNA, 21 nt, Artificial Sequence
  SAMD9L targeting guide sequence portion
ccaauucuucuugucaucaag

SEQ ID NO: 13169 - RNA, 21 nt, Artificial Sequence
  SAMD9L targeting guide sequence portion
ccaccaccagguaucuuagag

SEQ ID NO: 13170 - RNA, 21 nt, Artificial Sequence
  SAMD9L targeting guide sequence portion
ccaccagguaucuuagagagc

SEQ ID NO: 13171 - RNA, 21 nt, Artificial Sequence
  SAMD9L targeting guide sequence portion
ccaccaguccauacaguaaca

SEQ ID NO: 13172 - RNA, 21 nt, Artificial Sequence
  SAMD9L targeting guide sequence portion
ccacuugggagauccuguuac

SEQ ID NO: 13173 - RNA, 21 nt, Artificial Sequence
  SAMD9L targeting guide sequence portion
ccagaacaugucccucuuucu

SEQ ID NO: 13174 - RNA, 21 nt, Artificial Sequence
  SAMD9L targeting guide sequence portion
ccagaagaacccugauagagc

SEQ ID NO: 13175 - RNA, 21 nt, Artificial Sequence
  SAMD9L targeting guide sequence portion
ccagaauaucuaaguuacauu

SEQ ID NO: 13176 - RNA, 21 nt, Artificial Sequence
  SAMD9L targeting guide sequence portion
ccagauucauagaaauauagg

SEQ ID NO: 13177 - RNA, 21 nt, Artificial Sequence
  SAMD9L targeting guide sequence portion
ccagcaggggaguuuaaaaga

SEQ ID NO: 13178 - RNA, 21 nt, Artificial Sequence
  SAMD9L targeting guide sequence portion
ccaggccuaugaacaacuugg

SEQ ID NO: 13179 - RNA, 21 nt, Artificial Sequence
  SAMD9L targeting guide sequence portion
ccagguaucuuagagagcuuc

SEQ ID NO: 13180 - RNA, 21 nt, Artificial Sequence
  SAMD9L targeting guide sequence portion
ccaguccauacaguaacagga

SEQ ID NO: 13181 - RNA, 21 nt, Artificial Sequence
  SAMD9L targeting guide sequence portion
ccauaauuaucuuuagaguua

SEQ ID NO: 13182 - RNA, 21 nt, Artificial Sequence
  SAMD9L targeting guide sequence portion
ccauacaguaacaggaucucc

SEQ ID NO: 13183 - RNA, 21 nt, Artificial Sequence
  SAMD9L targeting guide sequence portion
ccaugugagcguugcccagau

SEQ ID NO: 13184 - RNA, 21 nt, Artificial Sequence
  SAMD9L targeting guide sequence portion
cccaaguggcuauacucccca

SEQ ID NO: 13185 - RNA, 21 nt, Artificial Sequence
  SAMD9L targeting guide sequence portion
cccaaguuguucauaggccug

SEQ ID NO: 13186 - RNA, 21 nt, Artificial Sequence
  SAMD9L targeting guide sequence portion
cccaauucuucuugucaucaa

SEQ ID NO: 13187 - RNA, 21 nt, Artificial Sequence
  SAMD9L targeting guide sequence portion
cccaccaccagguaucuuaga

SEQ ID NO: 13188 - RNA, 21 nt, Artificial Sequence
  SAMD9L targeting guide sequence portion
cccagauucauagaaauauag

SEQ ID NO: 13189 - RNA, 21 nt, Artificial Sequence
  SAMD9L targeting guide sequence portion
cccaggccuaugaacaacuug

SEQ ID NO: 13190 - RNA, 21 nt, Artificial Sequence
  SAMD9L targeting guide sequence portion
ccccaaguuguucauaggccu

SEQ ID NO: 13191 - RNA, 21 nt, Artificial Sequence
  SAMD9L targeting guide sequence portion
ccccaccaccagguaucuuag

SEQ ID NO: 13192 - RNA, 21 nt, Artificial Sequence
  SAMD9L targeting guide sequence portion
ccccaggccuaugaacaacuu

SEQ ID NO: 13193 - RNA, 21 nt, Artificial Sequence
  SAMD9L targeting guide sequence portion
ccccugcuggacuauaacauu

SEQ ID NO: 13194 - RNA, 21 nt, Artificial Sequence
  SAMD9L targeting guide sequence portion
cccucuucugcaguccaccag

SEQ ID NO: 13195 - RNA, 21 nt, Artificial Sequence
  SAMD9L targeting guide sequence portion
cccucuuucugaaagcugugu

SEQ ID NO: 13196 - RNA, 21 nt, Artificial Sequence
  SAMD9L targeting guide sequence portion
cccugauagagcauagacuuc

SEQ ID NO: 13197 - RNA, 21 nt, Artificial Sequence
  SAMD9L targeting guide sequence portion
cccugcuccaaacaguugccu

SEQ ID NO: 13198 - RNA, 21 nt, Artificial Sequence
  SAMD9L targeting guide sequence portion
cccugcuggacuauaacauuu

SEQ ID NO: 13199 - RNA, 21 nt, Artificial Sequence
  SAMD9L targeting guide sequence portion
ccuauauuucuaugaaucugg

SEQ ID NO: 13200 - RNA, 21 nt, Artificial Sequence
  SAMD9L targeting guide sequence portion
ccuaugaacaacuuggggagu

SEQ ID NO: 13201 - RNA, 21 nt, Artificial Sequence
  SAMD9L targeting guide sequence portion
ccuauguccccaggccuauga

SEQ ID NO: 13202 - RNA, 21 nt, Artificial Sequence
  SAMD9L targeting guide sequence portion
ccuauuucuuuuaaacucccc

SEQ ID NO: 13203 - RNA, 21 nt, Artificial Sequence
  SAMD9L targeting guide sequence portion
ccucccucuucugcaguccac

SEQ ID NO: 13204 - RNA, 21 nt, Artificial Sequence
  SAMD9L targeting guide sequence portion
ccuccuuucauuauaacuuuu

SEQ ID NO: 13205 - RNA, 21 nt, Artificial Sequence
  SAMD9L targeting guide sequence portion
ccucuucugcaguccaccagu

SEQ ID NO: 13206 - RNA, 21 nt, Artificial Sequence
  SAMD9L targeting guide sequence portion
ccucuuucugaaagcuguguc

SEQ ID NO: 13207 - RNA, 21 nt, Artificial Sequence
  SAMD9L targeting guide sequence portion
ccugauagagcauagacuucu

SEQ ID NO: 13208 - RNA, 21 nt, Artificial Sequence
  SAMD9L targeting guide sequence portion
ccugauccuauuucuuuuaaa

SEQ ID NO: 13209 - RNA, 21 nt, Artificial Sequence
  SAMD9L targeting guide sequence portion
ccugcuaaccauaauuaucuu

SEQ ID NO: 13210 - RNA, 21 nt, Artificial Sequence
  SAMD9L targeting guide sequence portion
ccugcuccaaacaguugccuc

SEQ ID NO: 13211 - RNA, 21 nt, Artificial Sequence
  SAMD9L targeting guide sequence portion
ccugcuggacuauaacauuua

SEQ ID NO: 13212 - RNA, 21 nt, Artificial Sequence
  SAMD9L targeting guide sequence portion
ccuggggacauaggccugauc

SEQ ID NO: 13213 - RNA, 21 nt, Artificial Sequence
  SAMD9L targeting guide sequence portion
ccuggugguggggucagaauu

SEQ ID NO: 13214 - RNA, 21 nt, Artificial Sequence
  SAMD9L targeting guide sequence portion
ccuguuacuguauggacuggu

SEQ ID NO: 13215 - RNA, 21 nt, Artificial Sequence
  SAMD9L targeting guide sequence portion
ccuucuccuuagcccccauuu

SEQ ID NO: 13216 - RNA, 21 nt, Artificial Sequence
  SAMD9L targeting guide sequence portion
ccuuuaguuaugucuuacuaa

SEQ ID NO: 13217 - RNA, 21 nt, Artificial Sequence
  SAMD9L targeting guide sequence portion
ccuuucauuauaacuuuuuuc

SEQ ID NO: 13218 - RNA, 21 nt, Artificial Sequence
  SAMD9L targeting guide sequence portion
cgcucacaugguccagaacau

SEQ ID NO: 13219 - RNA, 21 nt, Artificial Sequence
  SAMD9L targeting guide sequence portion
cguugcccagauucauagaaa

SEQ ID NO: 13220 - RNA, 21 nt, Artificial Sequence
  SAMD9L targeting guide sequence portion
cuaaagauaauuaugguuagc

SEQ ID NO: 13221 - RNA, 21 nt, Artificial Sequence
  SAMD9L targeting guide sequence portion
cuaaaggcuugauguagagaa

SEQ ID NO: 13222 - RNA, 21 nt, Artificial Sequence
  SAMD9L targeting guide sequence portion
cuaaauauuccugcuaaccau

SEQ ID NO: 13223 - RNA, 21 nt, Artificial Sequence
  SAMD9L targeting guide sequence portion
cuaaauguuauaguccagcag

SEQ ID NO: 13224 - RNA, 21 nt, Artificial Sequence
  SAMD9L targeting guide sequence portion
cuaaccauaauuaucuuuaga

SEQ ID NO: 13225 - RNA, 21 nt, Artificial Sequence
  SAMD9L targeting guide sequence portion
cuaagauaccugguggugggg

SEQ ID NO: 13226 - RNA, 21 nt, Artificial Sequence
  SAMD9L targeting guide sequence portion
cuaaggagaaggaagcucucu

SEQ ID NO: 13227 - RNA, 21 nt, Artificial Sequence
  SAMD9L targeting guide sequence portion
cuaaguuacauuacaaagaga

SEQ ID NO: 13228 - RNA, 21 nt, Artificial Sequence
  SAMD9L targeting guide sequence portion
cuacaucaagccuuuaguuau

SEQ ID NO: 13229 - RNA, 21 nt, Artificial Sequence
  SAMD9L targeting guide sequence portion
cuacuaaauauuccugcuaac

SEQ ID NO: 13230 - RNA, 21 nt, Artificial Sequence
  SAMD9L targeting guide sequence portion
cuauaacauuuaguaagacau

SEQ ID NO: 13231 - RNA, 21 nt, Artificial Sequence
  SAMD9L targeting guide sequence portion
cuauacuccccaaguuguuca

SEQ ID NO: 13232 - RNA, 21 nt, Artificial Sequence
  SAMD9L targeting guide sequence portion
cuauauuucuaugaaucuggg

SEQ ID NO: 13233 - RNA, 21 nt, Artificial Sequence
  SAMD9L targeting guide sequence portion
cuaucaggguucuucuggccu

SEQ ID NO: 13234 - RNA, 21 nt, Artificial Sequence
  SAMD9L targeting guide sequence portion
cuaugaacaacuuggggagua

SEQ ID NO: 13235 - RNA, 21 nt, Artificial Sequence
  SAMD9L targeting guide sequence portion
cuaugaaucugggcaacgcuc

SEQ ID NO: 13236 - RNA, 21 nt, Artificial Sequence
  SAMD9L targeting guide sequence portion
cuaugcucuaucaggguucuu

SEQ ID NO: 13237 - RNA, 21 nt, Artificial Sequence
  SAMD9L targeting guide sequence portion
cuauguccccaggccuaugaa

SEQ ID NO: 13238 - RNA, 21 nt, Artificial Sequence
  SAMD9L targeting guide sequence portion
cuauuucuuuuaaacuccccu

SEQ ID NO: 13239 - RNA, 21 nt, Artificial Sequence
  SAMD9L targeting guide sequence portion
cucacaugguccagaacaugu

SEQ ID NO: 13240 - RNA, 21 nt, Artificial Sequence
  SAMD9L targeting guide sequence portion
cuccaaacaguugccucccuc

SEQ ID NO: 13241 - RNA, 21 nt, Artificial Sequence
  SAMD9L targeting guide sequence portion
cuccaaacccaauucuucuug

SEQ ID NO: 13242 - RNA, 21 nt, Artificial Sequence
  SAMD9L targeting guide sequence portion
cucccaaguggcuauacuccc

SEQ ID NO: 13243 - RNA, 21 nt, Artificial Sequence
  SAMD9L targeting guide sequence portion
cuccccaaguuguucauaggc

SEQ ID NO: 13244 - RNA, 21 nt, Artificial Sequence
  SAMD9L targeting guide sequence portion
cuccccugcuggacuauaaca

SEQ ID NO: 13245 - RNA, 21 nt, Artificial Sequence
  SAMD9L targeting guide sequence portion
cucccucuucugcaguccacc

SEQ ID NO: 13246 - RNA, 21 nt, Artificial Sequence
  SAMD9L targeting guide sequence portion
cuccuuucauuauaacuuuuu

SEQ ID NO: 13247 - RNA, 21 nt, Artificial Sequence
  SAMD9L targeting guide sequence portion
cucuaaagauaauuaugguua

SEQ ID NO: 13248 - RNA, 21 nt, Artificial Sequence
  SAMD9L targeting guide sequence portion
cucuaagauaccugguggugg

SEQ ID NO: 13249 - RNA, 21 nt, Artificial Sequence
  SAMD9L targeting guide sequence portion
cucuacaucaagccuuuaguu

SEQ ID NO: 13250 - RNA, 21 nt, Artificial Sequence
  SAMD9L targeting guide sequence portion
cucuaucaggguucuucuggc

SEQ ID NO: 13251 - RNA, 21 nt, Artificial Sequence
  SAMD9L targeting guide sequence portion
cucucuaagauaccugguggu

SEQ ID NO: 13252 - RNA, 21 nt, Artificial Sequence
  SAMD9L targeting guide sequence portion
cucuucugcaguccaccaguc

SEQ ID NO: 13253 - RNA, 21 nt, Artificial Sequence
  SAMD9L targeting guide sequence portion
cucuuucugaaagcugugucu

SEQ ID NO: 13254 - RNA, 21 nt, Artificial Sequence
  SAMD9L targeting guide sequence portion
cucuuuguaauguaacuuaga

SEQ ID NO: 13255 - RNA, 21 nt, Artificial Sequence
  SAMD9L targeting guide sequence portion
cugaaagcugugucugcugcu

SEQ ID NO: 13256 - RNA, 21 nt, Artificial Sequence
  SAMD9L targeting guide sequence portion
cugaccccaccaccagguauc

SEQ ID NO: 13257 - RNA, 21 nt, Artificial Sequence
  SAMD9L targeting guide sequence portion
cugacccugcuccaaacaguu

SEQ ID NO: 13258 - RNA, 21 nt, Artificial Sequence
  SAMD9L targeting guide sequence portion
cugauagagcauagacuucuu

SEQ ID NO: 13259 - RNA, 21 nt, Artificial Sequence
  SAMD9L targeting guide sequence portion
cugauccuauuucuuuuaaac

SEQ ID NO: 13260 - RNA, 21 nt, Artificial Sequence
  SAMD9L targeting guide sequence portion
cugcagaagagggaggcaacu

SEQ ID NO: 13261 - RNA, 21 nt, Artificial Sequence
  SAMD9L targeting guide sequence portion
cugcaguccaccaguccauac

SEQ ID NO: 13262 - RNA, 21 nt, Artificial Sequence
  SAMD9L targeting guide sequence portion
cugcuaaccauaauuaucuuu

SEQ ID NO: 13263 - RNA, 21 nt, Artificial Sequence
  SAMD9L targeting guide sequence portion
cugcuccaaacaguugccucc

SEQ ID NO: 13264 - RNA, 21 nt, Artificial Sequence
  SAMD9L targeting guide sequence portion
cugcugacccugcuccaaaca

SEQ ID NO: 13265 - RNA, 21 nt, Artificial Sequence
  SAMD9L targeting guide sequence portion
cugcugcugacccugcuccaa

SEQ ID NO: 13266 - RNA, 21 nt, Artificial Sequence
  SAMD9L targeting guide sequence portion
cugcuggacuauaacauuuag

SEQ ID NO: 13267 - RNA, 21 nt, Artificial Sequence
  SAMD9L targeting guide sequence portion
cuggaccaugugagcguugcc

SEQ ID NO: 13268 - RNA, 21 nt, Artificial Sequence
  SAMD9L targeting guide sequence portion
cuggacuauaacauuuaguaa

SEQ ID NO: 13269 - RNA, 21 nt, Artificial Sequence
  SAMD9L targeting guide sequence portion
cuggacuccaaacccaauucu

SEQ ID NO: 13270 - RNA, 21 nt, Artificial Sequence
  SAMD9L targeting guide sequence portion
cuggccuauauuucuaugaau

SEQ ID NO: 13271 - RNA, 21 nt, Artificial Sequence
  SAMD9L targeting guide sequence portion
cugggcaacgcucacaugguc

SEQ ID NO: 13272 - RNA, 21 nt, Artificial Sequence
  SAMD9L targeting guide sequence portion
cuggggacauaggccugaucc

SEQ ID NO: 13273 - RNA, 21 nt, Artificial Sequence
  SAMD9L targeting guide sequence portion
cugguggacugcagaagaggg

SEQ ID NO: 13274 - RNA, 21 nt, Artificial Sequence
  SAMD9L targeting guide sequence portion
cuggugguggggucagaauua

SEQ ID NO: 13275 - RNA, 21 nt, Artificial Sequence
  SAMD9L targeting guide sequence portion
cuguauggacugguggacugc

SEQ ID NO: 13276 - RNA, 21 nt, Artificial Sequence
  SAMD9L targeting guide sequence portion
cugugucugcugcugacccug

SEQ ID NO: 13277 - RNA, 21 nt, Artificial Sequence
  SAMD9L targeting guide sequence portion
cuguuacuguauggacuggug

SEQ ID NO: 13278 - RNA, 21 nt, Artificial Sequence
  SAMD9L targeting guide sequence portion
cuguugaaaugggggcuaagg

SEQ ID NO: 13279 - RNA, 21 nt, Artificial Sequence
  SAMD9L targeting guide sequence portion
cuguuuggagcagggucagca

SEQ ID NO: 13280 - RNA, 21 nt, Artificial Sequence
  SAMD9L targeting guide sequence portion
cuuacuaaauguuauagucca

SEQ ID NO: 13281 - RNA, 21 nt, Artificial Sequence
  SAMD9L targeting guide sequence portion
cuuagagagcuuccuucuccu

SEQ ID NO: 13282 - RNA, 21 nt, Artificial Sequence
  SAMD9L targeting guide sequence portion
cuuagauauucuggacuccaa

SEQ ID NO: 13283 - RNA, 21 nt, Artificial Sequence
  SAMD9L targeting guide sequence portion
cuuccuucuccuuagccccca

SEQ ID NO: 13284 - RNA, 21 nt, Artificial Sequence
  SAMD9L targeting guide sequence portion
cuucuccuuagcccccauuuc

SEQ ID NO: 13285 - RNA, 21 nt, Artificial Sequence
  SAMD9L targeting guide sequence portion
cuucugcaguccaccagucca

SEQ ID NO: 13286 - RNA, 21 nt, Artificial Sequence
  SAMD9L targeting guide sequence portion
cuucuggccuauauuucuaug

SEQ ID NO: 13287 - RNA, 21 nt, Artificial Sequence
  SAMD9L targeting guide sequence portion
cuucuugaugacaagaagaau

SEQ ID NO: 13288 - RNA, 21 nt, Artificial Sequence
  SAMD9L targeting guide sequence portion
cuucuugucaucaagaagucu

SEQ ID NO: 13289 - RNA, 21 nt, Artificial Sequence
  SAMD9L targeting guide sequence portion
cuugaugacaagaagaauugg

SEQ ID NO: 13290 - RNA, 21 nt, Artificial Sequence
  SAMD9L targeting guide sequence portion
cuugauguagagaaaaaaguu

SEQ ID NO: 13291 - RNA, 21 nt, Artificial Sequence
  SAMD9L targeting guide sequence portion
cuugggagauccuguuacugu

SEQ ID NO: 13292 - RNA, 21 nt, Artificial Sequence
  SAMD9L targeting guide sequence portion
cuuggggaguauagccacuug

SEQ ID NO: 13293 - RNA, 21 nt, Artificial Sequence
  SAMD9L targeting guide sequence portion
cuugucaucaagaagucuaug

SEQ ID NO: 13294 - RNA, 21 nt, Artificial Sequence
  SAMD9L targeting guide sequence portion
cuuuagaguuaauaauucuga

SEQ ID NO: 13295 - RNA, 21 nt, Artificial Sequence
  SAMD9L targeting guide sequence portion
cuuuaguuaugucuuacuaaa

SEQ ID NO: 13296 - RNA, 21 nt, Artificial Sequence
  SAMD9L targeting guide sequence portion
cuuucagaaagagggacaugu

SEQ ID NO: 13297 - RNA, 21 nt, Artificial Sequence
  SAMD9L targeting guide sequence portion
cuuucauuauaacuuuuuucu

SEQ ID NO: 13298 - RNA, 21 nt, Artificial Sequence
  SAMD9L targeting guide sequence portion
cuuucugaaagcugugucugc

SEQ ID NO: 13299 - RNA, 21 nt, Artificial Sequence
  SAMD9L targeting guide sequence portion
cuuuguaauguaacuuagaua

SEQ ID NO: 13300 - RNA, 21 nt, Artificial Sequence
  SAMD9L targeting guide sequence portion
cuuuguaucucuuuguaaugu

SEQ ID NO: 13301 - RNA, 21 nt, Artificial Sequence
  SAMD9L targeting guide sequence portion
cuuuuaaacuccccugcugga

SEQ ID NO: 13302 - RNA, 21 nt, Artificial Sequence
  SAMD9L targeting guide sequence portion
cuuuuuucucuacaucaagcc

SEQ ID NO: 13303 - RNA, 21 nt, Artificial Sequence
  SAMD9L targeting guide sequence portion
gaaaaaaguuauaaugaaagg

SEQ ID NO: 13304 - RNA, 21 nt, Artificial Sequence
  SAMD9L targeting guide sequence portion
gaaaaacuacuaaauauuccu

SEQ ID NO: 13305 - RNA, 21 nt, Artificial Sequence
  SAMD9L targeting guide sequence portion
gaaagagggacauguucugga

SEQ ID NO: 13306 - RNA, 21 nt, Artificial Sequence
  SAMD9L targeting guide sequence portion
gaaagcugugucugcugcuga

SEQ ID NO: 13307 - RNA, 21 nt, Artificial Sequence
  SAMD9L targeting guide sequence portion
gaaaggaggaaaaacuacuaa

SEQ ID NO: 13308 - RNA, 21 nt, Artificial Sequence
  SAMD9L targeting guide sequence portion
gaaauaggaucaggccuaugu

SEQ ID NO: 13309 - RNA, 21 nt, Artificial Sequence
  SAMD9L targeting guide sequence portion
gaaauauaggccagaagaacc

SEQ ID NO: 13310 - RNA, 21 nt, Artificial Sequence
  SAMD9L targeting guide sequence portion
gaaaugggggcuaaggagaag

SEQ ID NO: 13311 - RNA, 21 nt, Artificial Sequence
  SAMD9L targeting guide sequence portion
gaacaacuuggggaguauagc

SEQ ID NO: 13312 - RNA, 21 nt, Artificial Sequence
  SAMD9L targeting guide sequence portion
gaacaugucccucuuucugaa

SEQ ID NO: 13313 - RNA, 21 nt, Artificial Sequence
  SAMD9L targeting guide sequence portion
gaacccugauagagcauagac

SEQ ID NO: 13314 - RNA, 21 nt, Artificial Sequence
  SAMD9L targeting guide sequence portion
gaagaacccugauagagcaua

SEQ ID NO: 13315 - RNA, 21 nt, Artificial Sequence
  SAMD9L targeting guide sequence portion
gaagaauuggguuuggagucc

SEQ ID NO: 13316 - RNA, 21 nt, Artificial Sequence
  SAMD9L targeting guide sequence portion
gaagagggaggcaacuguuug

SEQ ID NO: 13317 - RNA, 21 nt, Artificial Sequence
  SAMD9L targeting guide sequence portion
gaagcucucuaagauaccugg

SEQ ID NO: 13318 - RNA, 21 nt, Artificial Sequence
  SAMD9L targeting guide sequence portion
gaaggaagcucucuaagauac

SEQ ID NO: 13319 - RNA, 21 nt, Artificial Sequence
  SAMD9L targeting guide sequence portion
gaagucuaugcucuaucaggg

SEQ ID NO: 13320 - RNA, 21 nt, Artificial Sequence
  SAMD9L targeting guide sequence portion
gaauaucuaaguuacauuaca

SEQ ID NO: 13321 - RNA, 21 nt, Artificial Sequence
  SAMD9L targeting guide sequence portion
gaauauuuaguaguuuuuccu

SEQ ID NO: 13322 - RNA, 21 nt, Artificial Sequence
  SAMD9L targeting guide sequence portion
gaaucugggcaacgcucacau

SEQ ID NO: 13323 - RNA, 21 nt, Artificial Sequence
  SAMD9L targeting guide sequence portion
gaauuauuaacucuaaagaua

SEQ ID NO: 13324 - RNA, 21 nt, Artificial Sequence
  SAMD9L targeting guide sequence portion
gaauuggguuuggaguccaga

SEQ ID NO: 13325 - RNA, 21 nt, Artificial Sequence
  SAMD9L targeting guide sequence portion
gacaagaagaauuggguuugg

SEQ ID NO: 13326 - RNA, 21 nt, Artificial Sequence
  SAMD9L targeting guide sequence portion
gacacagcuuucagaaagagg

SEQ ID NO: 13327 - RNA, 21 nt, Artificial Sequence
  SAMD9L targeting guide sequence portion
gacauaacuaaaggcuugaug

SEQ ID NO: 13328 - RNA, 21 nt, Artificial Sequence
  SAMD9L targeting guide sequence portion
gacauaggccugauccuauuu

SEQ ID NO: 13329 - RNA, 21 nt, Artificial Sequence
  SAMD9L targeting guide sequence portion
gacauguucuggaccauguga

SEQ ID NO: 13330 - RNA, 21 nt, Artificial Sequence
  SAMD9L targeting guide sequence portion
gaccaugugagcguugcccag

SEQ ID NO: 13331 - RNA, 21 nt, Artificial Sequence
  SAMD9L targeting guide sequence portion
gaccccaccaccagguaucuu

SEQ ID NO: 13332 - RNA, 21 nt, Artificial Sequence
  SAMD9L targeting guide sequence portion
gacccugcuccaaacaguugc

SEQ ID NO: 13333 - RNA, 21 nt, Artificial Sequence
  SAMD9L targeting guide sequence portion
gacuauaacauuuaguaagac

SEQ ID NO: 13334 - RNA, 21 nt, Artificial Sequence
  SAMD9L targeting guide sequence portion
gacuccaaacccaauucuucu

SEQ ID NO: 13335 - RNA, 21 nt, Artificial Sequence
  SAMD9L targeting guide sequence portion
gacugcagaagagggaggcaa

SEQ ID NO: 13336 - RNA, 21 nt, Artificial Sequence
  SAMD9L targeting guide sequence portion
gacugguggacugcagaagag

SEQ ID NO: 13337 - RNA, 21 nt, Artificial Sequence
  SAMD9L targeting guide sequence portion
gacuucuugaugacaagaaga

SEQ ID NO: 13338 - RNA, 21 nt, Artificial Sequence
  SAMD9L targeting guide sequence portion
gagaaaaaaguuauaaugaaa

SEQ ID NO: 13339 - RNA, 21 nt, Artificial Sequence
  SAMD9L targeting guide sequence portion
gagaaggaagcucucuaagau

SEQ ID NO: 13340 - RNA, 21 nt, Artificial Sequence
  SAMD9L targeting guide sequence portion
gagagcuuccuucuccuuagc

SEQ ID NO: 13341 - RNA, 21 nt, Artificial Sequence
  SAMD9L targeting guide sequence portion
gagauccuguuacuguaugga

SEQ ID NO: 13342 - RNA, 21 nt, Artificial Sequence
  SAMD9L targeting guide sequence portion
gagcagggucagcagcagaca

SEQ ID NO: 13343 - RNA, 21 nt, Artificial Sequence
  SAMD9L targeting guide sequence portion
gagcauagacuucuugaugac

SEQ ID NO: 13344 - RNA, 21 nt, Artificial Sequence
  SAMD9L targeting guide sequence portion
gagcguugcccagauucauag

SEQ ID NO: 13345 - RNA, 21 nt, Artificial Sequence
  SAMD9L targeting guide sequence portion
gagcuuccuucuccuuagccc

SEQ ID NO: 13346 - RNA, 21 nt, Artificial Sequence
  SAMD9L targeting guide sequence portion
gaggaaaaacuacuaaauauu

SEQ ID NO: 13347 - RNA, 21 nt, Artificial Sequence
  SAMD9L targeting guide sequence portion
gaggcaacuguuuggagcagg

SEQ ID NO: 13348 - RNA, 21 nt, Artificial Sequence
  SAMD9L targeting guide sequence portion
gagggacauguucuggaccau

SEQ ID NO: 13349 - RNA, 21 nt, Artificial Sequence
  SAMD9L targeting guide sequence portion
gagggaggcaacuguuuggag

SEQ ID NO: 13350 - RNA, 21 nt, Artificial Sequence
  SAMD9L targeting guide sequence portion
gaguauagccacuugggagau

SEQ ID NO: 13351 - RNA, 21 nt, Artificial Sequence
  SAMD9L targeting guide sequence portion
gaguccagaauaucuaaguua

SEQ ID NO: 13352 - RNA, 21 nt, Artificial Sequence
  SAMD9L targeting guide sequence portion
gaguuaauaauucugacccca

SEQ ID NO: 13353 - RNA, 21 nt, Artificial Sequence
  SAMD9L targeting guide sequence portion
gaguuuaaaagaaauaggauc

SEQ ID NO: 13354 - RNA, 21 nt, Artificial Sequence
  SAMD9L targeting guide sequence portion
gauaauuaugguuagcaggaa

SEQ ID NO: 13355 - RNA, 21 nt, Artificial Sequence
  SAMD9L targeting guide sequence portion
gauaccuggugguggggucag

SEQ ID NO: 13356 - RNA, 21 nt, Artificial Sequence
  SAMD9L targeting guide sequence portion
gauagagcauagacuucuuga

SEQ ID NO: 13357 - RNA, 21 nt, Artificial Sequence
  SAMD9L targeting guide sequence portion
gauauucuggacuccaaaccc

SEQ ID NO: 13358 - RNA, 21 nt, Artificial Sequence
  SAMD9L targeting guide sequence portion
gaucaggccuauguccccagg

SEQ ID NO: 13359 - RNA, 21 nt, Artificial Sequence
  SAMD9L targeting guide sequence portion
gauccuauuucuuuuaaacuc

SEQ ID NO: 13360 - RNA, 21 nt, Artificial Sequence
  SAMD9L targeting guide sequence portion
gauccuguuacuguauggacu

SEQ ID NO: 13361 - RNA, 21 nt, Artificial Sequence
  SAMD9L targeting guide sequence portion
gaucucccaaguggcuauacu

SEQ ID NO: 13362 - RNA, 21 nt, Artificial Sequence
  SAMD9L targeting guide sequence portion
gaugacaagaagaauuggguu

SEQ ID NO: 13363 - RNA, 21 nt, Artificial Sequence
  SAMD9L targeting guide sequence portion
gauguagagaaaaaaguuaua

SEQ ID NO: 13364 - RNA, 21 nt, Artificial Sequence
  SAMD9L targeting guide sequence portion
gauucauagaaauauaggcca

SEQ ID NO: 13365 - RNA, 21 nt, Artificial Sequence
  SAMD9L targeting guide sequence portion
gcaacgcucacaugguccaga

SEQ ID NO: 13366 - RNA, 21 nt, Artificial Sequence
  SAMD9L targeting guide sequence portion
gcaacuguuuggagcaggguc

SEQ ID NO: 13367 - RNA, 21 nt, Artificial Sequence
  SAMD9L targeting guide sequence portion
gcagaagagggaggcaacugu

SEQ ID NO: 13368 - RNA, 21 nt, Artificial Sequence
  SAMD9L targeting guide sequence portion
gcagacacagcuuucagaaag

SEQ ID NO: 13369 - RNA, 21 nt, Artificial Sequence
  SAMD9L targeting guide sequence portion
gcagcagacacagcuuucaga

SEQ ID NO: 13370 - RNA, 21 nt, Artificial Sequence
  SAMD9L targeting guide sequence portion
gcaggaauauuuaguaguuuu

SEQ ID NO: 13371 - RNA, 21 nt, Artificial Sequence
  SAMD9L targeting guide sequence portion
gcaggggaguuuaaaagaaau

SEQ ID NO: 13372 - RNA, 21 nt, Artificial Sequence
  SAMD9L targeting guide sequence portion
gcagggucagcagcagacaca

SEQ ID NO: 13373 - RNA, 21 nt, Artificial Sequence
  SAMD9L targeting guide sequence portion
gcaguccaccaguccauacag

SEQ ID NO: 13374 - RNA, 21 nt, Artificial Sequence
  SAMD9L targeting guide sequence portion
gcauagacuucuugaugacaa

SEQ ID NO: 13375 - RNA, 21 nt, Artificial Sequence
  SAMD9L targeting guide sequence portion
gccacuugggagauccuguua

SEQ ID NO: 13376 - RNA, 21 nt, Artificial Sequence
  SAMD9L targeting guide sequence portion
gccagaagaacccugauagag

SEQ ID NO: 13377 - RNA, 21 nt, Artificial Sequence
  SAMD9L targeting guide sequence portion
gcccagauucauagaaauaua

SEQ ID NO: 13378 - RNA, 21 nt, Artificial Sequence
  SAMD9L targeting guide sequence portion
gccuauauuucuaugaaucug

SEQ ID NO: 13379 - RNA, 21 nt, Artificial Sequence
  SAMD9L targeting guide sequence portion
gccuaugaacaacuuggggag

SEQ ID NO: 13380 - RNA, 21 nt, Artificial Sequence
  SAMD9L targeting guide sequence portion
gccuauguccccaggccuaug

SEQ ID NO: 13381 - RNA, 21 nt, Artificial Sequence
  SAMD9L targeting guide sequence portion
gccucccucuucugcagucca

SEQ ID NO: 13382 - RNA, 21 nt, Artificial Sequence
  SAMD9L targeting guide sequence portion
gccugauccuauuucuuuuaa

SEQ ID NO: 13383 - RNA, 21 nt, Artificial Sequence
  SAMD9L targeting guide sequence portion
gccuggggacauaggccugau

SEQ ID NO: 13384 - RNA, 21 nt, Artificial Sequence
  SAMD9L targeting guide sequence portion
gccuuuaguuaugucuuacua

SEQ ID NO: 13385 - RNA, 21 nt, Artificial Sequence
  SAMD9L targeting guide sequence portion
gcguugcccagauucauagaa

SEQ ID NO: 13386 - RNA, 21 nt, Artificial Sequence
  SAMD9L targeting guide sequence portion
gcuaaccauaauuaucuuuag

SEQ ID NO: 13387 - RNA, 21 nt, Artificial Sequence
  SAMD9L targeting guide sequence portion
gcuaaggagaaggaagcucuc

SEQ ID NO: 13388 - RNA, 21 nt, Artificial Sequence
  SAMD9L targeting guide sequence portion
gcuauacuccccaaguuguuc

SEQ ID NO: 13389 - RNA, 21 nt, Artificial Sequence
  SAMD9L targeting guide sequence portion
gcucacaugguccagaacaug

SEQ ID NO: 13390 - RNA, 21 nt, Artificial Sequence
  SAMD9L targeting guide sequence portion
gcuccaaacaguugccucccu

SEQ ID NO: 13391 - RNA, 21 nt, Artificial Sequence
  SAMD9L targeting guide sequence portion
gcucuaucaggguucuucugg

SEQ ID NO: 13392 - RNA, 21 nt, Artificial Sequence
  SAMD9L targeting guide sequence portion
gcucucuaagauaccuggugg

SEQ ID NO: 13393 - RNA, 21 nt, Artificial Sequence
  SAMD9L targeting guide sequence portion
gcugacccugcuccaaacagu

SEQ ID NO: 13394 - RNA, 21 nt, Artificial Sequence
  SAMD9L targeting guide sequence portion
gcugcugacccugcuccaaac

SEQ ID NO: 13395 - RNA, 21 nt, Artificial Sequence
  SAMD9L targeting guide sequence portion
gcuggacuauaacauuuagua

SEQ ID NO: 13396 - RNA, 21 nt, Artificial Sequence
  SAMD9L targeting guide sequence portion
gcugugucugcugcugacccu

SEQ ID NO: 13397 - RNA, 21 nt, Artificial Sequence
  SAMD9L targeting guide sequence portion
gcuguugaaaugggggcuaag

SEQ ID NO: 13398 - RNA, 21 nt, Artificial Sequence
  SAMD9L targeting guide sequence portion
gcuuccuucuccuuagccccc

SEQ ID NO: 13399 - RNA, 21 nt, Artificial Sequence
  SAMD9L targeting guide sequence portion
gcuugauguagagaaaaaagu

SEQ ID NO: 13400 - RNA, 21 nt, Artificial Sequence
  SAMD9L targeting guide sequence portion
gcuuucagaaagagggacaug

SEQ ID NO: 13401 - RNA, 21 nt, Artificial Sequence
  SAMD9L targeting guide sequence portion
ggaaaaacuacuaaauauucc

SEQ ID NO: 13402 - RNA, 21 nt, Artificial Sequence
  SAMD9L targeting guide sequence portion
ggaagcucucuaagauaccug

SEQ ID NO: 13403 - RNA, 21 nt, Artificial Sequence
  SAMD9L targeting guide sequence portion
ggaauauuuaguaguuuuucc

SEQ ID NO: 13404 - RNA, 21 nt, Artificial Sequence
  SAMD9L targeting guide sequence portion
ggacauaggccugauccuauu

SEQ ID NO: 13405 - RNA, 21 nt, Artificial Sequence
  SAMD9L targeting guide sequence portion
ggacauguucuggaccaugug

SEQ ID NO: 13406 - RNA, 21 nt, Artificial Sequence
  SAMD9L targeting guide sequence portion
ggaccaugugagcguugccca

SEQ ID NO: 13407 - RNA, 21 nt, Artificial Sequence
  SAMD9L targeting guide sequence portion
ggacuauaacauuuaguaaga

SEQ ID NO: 13408 - RNA, 21 nt, Artificial Sequence
  SAMD9L targeting guide sequence portion
ggacuccaaacccaauucuuc

SEQ ID NO: 13409 - RNA, 21 nt, Artificial Sequence
  SAMD9L targeting guide sequence portion
ggacugcagaagagggaggca

SEQ ID NO: 13410 - RNA, 21 nt, Artificial Sequence
  SAMD9L targeting guide sequence portion
ggacugguggacugcagaaga

SEQ ID NO: 13411 - RNA, 21 nt, Artificial Sequence
  SAMD9L targeting guide sequence portion
ggagaaggaagcucucuaaga

SEQ ID NO: 13412 - RNA, 21 nt, Artificial Sequence
  SAMD9L targeting guide sequence portion
ggagauccuguuacuguaugg

SEQ ID NO: 13413 - RNA, 21 nt, Artificial Sequence
  SAMD9L targeting guide sequence portion
ggagcagggucagcagcagac

SEQ ID NO: 13414 - RNA, 21 nt, Artificial Sequence
  SAMD9L targeting guide sequence portion
ggaggaaaaacuacuaaauau

SEQ ID NO: 13415 - RNA, 21 nt, Artificial Sequence
  SAMD9L targeting guide sequence portion
ggaggcaacuguuuggagcag

SEQ ID NO: 13416 - RNA, 21 nt, Artificial Sequence
  SAMD9L targeting guide sequence portion
ggaguauagccacuugggaga

SEQ ID NO: 13417 - RNA, 21 nt, Artificial Sequence
  SAMD9L targeting guide sequence portion
ggaguccagaauaucuaaguu

SEQ ID NO: 13418 - RNA, 21 nt, Artificial Sequence
  SAMD9L targeting guide sequence portion
ggaguuuaaaagaaauaggau

SEQ ID NO: 13419 - RNA, 21 nt, Artificial Sequence
  SAMD9L targeting guide sequence portion
ggaucaggccuauguccccag

SEQ ID NO: 13420 - RNA, 21 nt, Artificial Sequence
  SAMD9L targeting guide sequence portion
ggaucucccaaguggcuauac

SEQ ID NO: 13421 - RNA, 21 nt, Artificial Sequence
  SAMD9L targeting guide sequence portion
ggcaacgcucacaugguccag

SEQ ID NO: 13422 - RNA, 21 nt, Artificial Sequence
  SAMD9L targeting guide sequence portion
ggcaacuguuuggagcagggu

SEQ ID NO: 13423 - RNA, 21 nt, Artificial Sequence
  SAMD9L targeting guide sequence portion
ggccagaagaacccugauaga

SEQ ID NO: 13424 - RNA, 21 nt, Artificial Sequence
  SAMD9L targeting guide sequence portion
ggccuauauuucuaugaaucu

SEQ ID NO: 13425 - RNA, 21 nt, Artificial Sequence
  SAMD9L targeting guide sequence portion
ggccuaugaacaacuugggga

SEQ ID NO: 13426 - RNA, 21 nt, Artificial Sequence
  SAMD9L targeting guide sequence portion
ggccuauguccccaggccuau

SEQ ID NO: 13427 - RNA, 21 nt, Artificial Sequence
  SAMD9L targeting guide sequence portion
ggccugauccuauuucuuuua

SEQ ID NO: 13428 - RNA, 21 nt, Artificial Sequence
  SAMD9L targeting guide sequence portion
ggccuggggacauaggccuga

SEQ ID NO: 13429 - RNA, 21 nt, Artificial Sequence
  SAMD9L targeting guide sequence portion
ggcuaaggagaaggaagcucu

SEQ ID NO: 13430 - RNA, 21 nt, Artificial Sequence
  SAMD9L targeting guide sequence portion
ggcuauacuccccaaguuguu

SEQ ID NO: 13431 - RNA, 21 nt, Artificial Sequence
  SAMD9L targeting guide sequence portion
ggcuguugaaaugggggcuaa

SEQ ID NO: 13432 - RNA, 21 nt, Artificial Sequence
  SAMD9L targeting guide sequence portion
ggcuugauguagagaaaaaag

SEQ ID NO: 13433 - RNA, 21 nt, Artificial Sequence
  SAMD9L targeting guide sequence portion
gggacauaggccugauccuau

SEQ ID NO: 13434 - RNA, 21 nt, Artificial Sequence
  SAMD9L targeting guide sequence portion
gggacauguucuggaccaugu

SEQ ID NO: 13435 - RNA, 21 nt, Artificial Sequence
  SAMD9L targeting guide sequence portion
gggagauccuguuacuguaug

SEQ ID NO: 13436 - RNA, 21 nt, Artificial Sequence
  SAMD9L targeting guide sequence portion
gggaggcaacuguuuggagca

SEQ ID NO: 13437 - RNA, 21 nt, Artificial Sequence
  SAMD9L targeting guide sequence portion
gggaguauagccacuugggag

SEQ ID NO: 13438 - RNA, 21 nt, Artificial Sequence
  SAMD9L targeting guide sequence portion
gggaguuuaaaagaaauagga

SEQ ID NO: 13439 - RNA, 21 nt, Artificial Sequence
  SAMD9L targeting guide sequence portion
gggcaacgcucacauggucca

SEQ ID NO: 13440 - RNA, 21 nt, Artificial Sequence
  SAMD9L targeting guide sequence portion
gggcuaaggagaaggaagcuc

SEQ ID NO: 13441 - RNA, 21 nt, Artificial Sequence
  SAMD9L targeting guide sequence portion
ggggacauaggccugauccua

SEQ ID NO: 13442 - RNA, 21 nt, Artificial Sequence
  SAMD9L targeting guide sequence portion
ggggaguauagccacuuggga

SEQ ID NO: 13443 - RNA, 21 nt, Artificial Sequence
  SAMD9L targeting guide sequence portion
ggggaguuuaaaagaaauagg

SEQ ID NO: 13444 - RNA, 21 nt, Artificial Sequence
  SAMD9L targeting guide sequence portion
ggggcuaaggagaaggaagcu

SEQ ID NO: 13445 - RNA, 21 nt, Artificial Sequence
  SAMD9L targeting guide sequence portion
gggggcuaaggagaaggaagc

SEQ ID NO: 13446 - RNA, 21 nt, Artificial Sequence
  SAMD9L targeting guide sequence portion
ggggucagaauuauuaacucu

SEQ ID NO: 13447 - RNA, 21 nt, Artificial Sequence
  SAMD9L targeting guide sequence portion
gggucagaauuauuaacucua

SEQ ID NO: 13448 - RNA, 21 nt, Artificial Sequence
  SAMD9L targeting guide sequence portion
gggucagcagcagacacagcu

SEQ ID NO: 13449 - RNA, 21 nt, Artificial Sequence
  SAMD9L targeting guide sequence portion
ggguucuucuggccuauauuu

SEQ ID NO: 13450 - RNA, 21 nt, Artificial Sequence
  SAMD9L targeting guide sequence portion
ggguuuggaguccagaauauc

SEQ ID NO: 13451 - RNA, 21 nt, Artificial Sequence
  SAMD9L targeting guide sequence portion
gguaucuuagagagcuuccuu

SEQ ID NO: 13452 - RNA, 21 nt, Artificial Sequence
  SAMD9L targeting guide sequence portion
ggucagaauuauuaacucuaa

SEQ ID NO: 13453 - RNA, 21 nt, Artificial Sequence
  SAMD9L targeting guide sequence portion
ggucagcagcagacacagcuu

SEQ ID NO: 13454 - RNA, 21 nt, Artificial Sequence
  SAMD9L targeting guide sequence portion
gguccagaacaugucccucuu

SEQ ID NO: 13455 - RNA, 21 nt, Artificial Sequence
  SAMD9L targeting guide sequence portion
gguggacugcagaagagggag

SEQ ID NO: 13456 - RNA, 21 nt, Artificial Sequence
  SAMD9L targeting guide sequence portion
gguggggucagaauuauuaac

SEQ ID NO: 13457 - RNA, 21 nt, Artificial Sequence
  SAMD9L targeting guide sequence portion
ggugguggggucagaauuauu

SEQ ID NO: 13458 - RNA, 21 nt, Artificial Sequence
  SAMD9L targeting guide sequence portion
gguuagcaggaauauuuagua

SEQ ID NO: 13459 - RNA, 21 nt, Artificial Sequence
  SAMD9L targeting guide sequence portion
gguucuucuggccuauauuuc

SEQ ID NO: 13460 - RNA, 21 nt, Artificial Sequence
  SAMD9L targeting guide sequence portion
gguuuggaguccagaauaucu

SEQ ID NO: 13461 - RNA, 21 nt, Artificial Sequence
  SAMD9L targeting guide sequence portion
guaacaggaucucccaagugg

SEQ ID NO: 13462 - RNA, 21 nt, Artificial Sequence
  SAMD9L targeting guide sequence portion
guaacuuagauauucuggacu

SEQ ID NO: 13463 - RNA, 21 nt, Artificial Sequence
  SAMD9L targeting guide sequence portion
guaagacauaacuaaaggcuu

SEQ ID NO: 13464 - RNA, 21 nt, Artificial Sequence
  SAMD9L targeting guide sequence portion
guaauguaacuuagauauucu

SEQ ID NO: 13465 - RNA, 21 nt, Artificial Sequence
  SAMD9L targeting guide sequence portion
guagagaaaaaaguuauaaug

SEQ ID NO: 13466 - RNA, 21 nt, Artificial Sequence
  SAMD9L targeting guide sequence portion
guaguuuuuccuccuuucauu

SEQ ID NO: 13467 - RNA, 21 nt, Artificial Sequence
  SAMD9L targeting guide sequence portion
guauagccacuugggagaucc

SEQ ID NO: 13468 - RNA, 21 nt, Artificial Sequence
  SAMD9L targeting guide sequence portion
guaucucuuuguaauguaacu

SEQ ID NO: 13469 - RNA, 21 nt, Artificial Sequence
  SAMD9L targeting guide sequence portion
guaucuuagagagcuuccuuc

SEQ ID NO: 13470 - RNA, 21 nt, Artificial Sequence
  SAMD9L targeting guide sequence portion
guauggacugguggacugcag

SEQ ID NO: 13471 - RNA, 21 nt, Artificial Sequence
  SAMD9L targeting guide sequence portion
gucagaauuauuaacucuaaa

SEQ ID NO: 13472 - RNA, 21 nt, Artificial Sequence
  SAMD9L targeting guide sequence portion
gucagcagcagacacagcuuu

SEQ ID NO: 13473 - RNA, 21 nt, Artificial Sequence
  SAMD9L targeting guide sequence portion
gucaucaagaagucuaugcuc

SEQ ID NO: 13474 - RNA, 21 nt, Artificial Sequence
  SAMD9L targeting guide sequence portion
guccaccaguccauacaguaa

SEQ ID NO: 13475 - RNA, 21 nt, Artificial Sequence
  SAMD9L targeting guide sequence portion
guccagaacaugucccucuuu

SEQ ID NO: 13476 - RNA, 21 nt, Artificial Sequence
  SAMD9L targeting guide sequence portion
guccagaauaucuaaguuaca

SEQ ID NO: 13477 - RNA, 21 nt, Artificial Sequence
  SAMD9L targeting guide sequence portion
guccagcaggggaguuuaaaa

SEQ ID NO: 13478 - RNA, 21 nt, Artificial Sequence
  SAMD9L targeting guide sequence portion
guccauacaguaacaggaucu

SEQ ID NO: 13479 - RNA, 21 nt, Artificial Sequence
  SAMD9L targeting guide sequence portion
guccccaggccuaugaacaac

SEQ ID NO: 13480 - RNA, 21 nt, Artificial Sequence
  SAMD9L targeting guide sequence portion
gucccucuuucugaaagcugu

SEQ ID NO: 13481 - RNA, 21 nt, Artificial Sequence
  SAMD9L targeting guide sequence portion
gucuaugcucuaucaggguuc

SEQ ID NO: 13482 - RNA, 21 nt, Artificial Sequence
  SAMD9L targeting guide sequence portion
gucugcugcugacccugcucc

SEQ ID NO: 13483 - RNA, 21 nt, Artificial Sequence
  SAMD9L targeting guide sequence portion
gucuuacuaaauguuauaguc

SEQ ID NO: 13484 - RNA, 21 nt, Artificial Sequence
  SAMD9L targeting guide sequence portion
gugagcguugcccagauucau

SEQ ID NO: 13485 - RNA, 21 nt, Artificial Sequence
  SAMD9L targeting guide sequence portion
guggacugcagaagagggagg

SEQ ID NO: 13486 - RNA, 21 nt, Artificial Sequence
  SAMD9L targeting guide sequence portion
guggcuauacuccccaaguug

SEQ ID NO: 13487 - RNA, 21 nt, Artificial Sequence
  SAMD9L targeting guide sequence portion
guggggucagaauuauuaacu

SEQ ID NO: 13488 - RNA, 21 nt, Artificial Sequence
  SAMD9L targeting guide sequence portion
gugguggggucagaauuauua

SEQ ID NO: 13489 - RNA, 21 nt, Artificial Sequence
  SAMD9L targeting guide sequence portion
gugucugcugcugacccugcu

SEQ ID NO: 13490 - RNA, 21 nt, Artificial Sequence
  SAMD9L targeting guide sequence portion
guuaauaauucugaccccacc

SEQ ID NO: 13491 - RNA, 21 nt, Artificial Sequence
  SAMD9L targeting guide sequence portion
guuacauuacaaagagauaca

SEQ ID NO: 13492 - RNA, 21 nt, Artificial Sequence
  SAMD9L targeting guide sequence portion
guuacuguauggacuggugga

SEQ ID NO: 13493 - RNA, 21 nt, Artificial Sequence
  SAMD9L targeting guide sequence portion
guuagcaggaauauuuaguag

SEQ ID NO: 13494 - RNA, 21 nt, Artificial Sequence
  SAMD9L targeting guide sequence portion
guuauaaugaaaggaggaaaa

SEQ ID NO: 13495 - RNA, 21 nt, Artificial Sequence
  SAMD9L targeting guide sequence portion
guuauaguccagcaggggagu

SEQ ID NO: 13496 - RNA, 21 nt, Artificial Sequence
  SAMD9L targeting guide sequence portion
guuaugucuuacuaaauguua

SEQ ID NO: 13497 - RNA, 21 nt, Artificial Sequence
  SAMD9L targeting guide sequence portion
guucauaggccuggggacaua

SEQ ID NO: 13498 - RNA, 21 nt, Artificial Sequence
  SAMD9L targeting guide sequence portion
guucuggaccaugugagcguu

SEQ ID NO: 13499 - RNA, 21 nt, Artificial Sequence
  SAMD9L targeting guide sequence portion
guucuucuggccuauauuucu

SEQ ID NO: 13500 - RNA, 21 nt, Artificial Sequence
  SAMD9L targeting guide sequence portion
guugaaaugggggcuaaggag

SEQ ID NO: 13501 - RNA, 21 nt, Artificial Sequence
  SAMD9L targeting guide sequence portion
guugcccagauucauagaaau

SEQ ID NO: 13502 - RNA, 21 nt, Artificial Sequence
  SAMD9L targeting guide sequence portion
guugccucccucuucugcagu

SEQ ID NO: 13503 - RNA, 21 nt, Artificial Sequence
  SAMD9L targeting guide sequence portion
guuguucauaggccuggggac

SEQ ID NO: 13504 - RNA, 21 nt, Artificial Sequence
  SAMD9L targeting guide sequence portion
guuuaaaagaaauaggaucag

SEQ ID NO: 13505 - RNA, 21 nt, Artificial Sequence
  SAMD9L targeting guide sequence portion
guuuggagcagggucagcagc

SEQ ID NO: 13506 - RNA, 21 nt, Artificial Sequence
  SAMD9L targeting guide sequence portion
guuuggaguccagaauaucua

SEQ ID NO: 13507 - RNA, 21 nt, Artificial Sequence
  SAMD9L targeting guide sequence portion
guuuuuccuccuuucauuaua

SEQ ID NO: 13508 - RNA, 21 nt, Artificial Sequence
  SAMD9L targeting guide sequence portion
uaaaagaaauaggaucaggcc

SEQ ID NO: 13509 - RNA, 21 nt, Artificial Sequence
  SAMD9L targeting guide sequence portion
uaaacuccccugcuggacuau

SEQ ID NO: 13510 - RNA, 21 nt, Artificial Sequence
  SAMD9L targeting guide sequence portion
uaaagauaauuaugguuagca

SEQ ID NO: 13511 - RNA, 21 nt, Artificial Sequence
  SAMD9L targeting guide sequence portion
uaaaggcuugauguagagaaa

SEQ ID NO: 13512 - RNA, 21 nt, Artificial Sequence
  SAMD9L targeting guide sequence portion
uaaauauuccugcuaaccaua

SEQ ID NO: 13513 - RNA, 21 nt, Artificial Sequence
  SAMD9L targeting guide sequence portion
uaaauguuauaguccagcagg

SEQ ID NO: 13514 - RNA, 21 nt, Artificial Sequence
  SAMD9L targeting guide sequence portion
uaacaggaucucccaaguggc

SEQ ID NO: 13515 - RNA, 21 nt, Artificial Sequence
  SAMD9L targeting guide sequence portion
uaacauuuaguaagacauaac

SEQ ID NO: 13516 - RNA, 21 nt, Artificial Sequence
  SAMD9L targeting guide sequence portion
uaaccauaauuaucuuuagag

SEQ ID NO: 13517 - RNA, 21 nt, Artificial Sequence
  SAMD9L targeting guide sequence portion
uaacuaaaggcuugauguaga

SEQ ID NO: 13518 - RNA, 21 nt, Artificial Sequence
  SAMD9L targeting guide sequence portion
uaacucuaaagauaauuaugg

SEQ ID NO: 13519 - RNA, 21 nt, Artificial Sequence
  SAMD9L targeting guide sequence portion
uaacuuagauauucuggacuc

SEQ ID NO: 13520 - RNA, 21 nt, Artificial Sequence
  SAMD9L targeting guide sequence portion
uaacuuuuuucucuacaucaa

SEQ ID NO: 13521 - RNA, 21 nt, Artificial Sequence
  SAMD9L targeting guide sequence portion
uaagacauaacuaaaggcuug

SEQ ID NO: 13522 - RNA, 21 nt, Artificial Sequence
  SAMD9L targeting guide sequence portion
uaagauaccuggugguggggu

SEQ ID NO: 13523 - RNA, 21 nt, Artificial Sequence
  SAMD9L targeting guide sequence portion
uaaggagaaggaagcucucua

SEQ ID NO: 13524 - RNA, 21 nt, Artificial Sequence
  SAMD9L targeting guide sequence portion
uaaguuacauuacaaagagau

SEQ ID NO: 13525 - RNA, 21 nt, Artificial Sequence
  SAMD9L targeting guide sequence portion
uaauaauucugaccccaccac

SEQ ID NO: 13526 - RNA, 21 nt, Artificial Sequence
  SAMD9L targeting guide sequence portion
uaaugaaaggaggaaaaacua

SEQ ID NO: 13527 - RNA, 21 nt, Artificial Sequence
  SAMD9L targeting guide sequence portion
uaauguaacuuagauauucug

SEQ ID NO: 13528 - RNA, 21 nt, Artificial Sequence
  SAMD9L targeting guide sequence portion
uaauuaucuuuagaguuaaua

SEQ ID NO: 13529 - RNA, 21 nt, Artificial Sequence
  SAMD9L targeting guide sequence portion
uaauuaugguuagcaggaaua

SEQ ID NO: 13530 - RNA, 21 nt, Artificial Sequence
  SAMD9L targeting guide sequence portion
uaauucugaccccaccaccag

SEQ ID NO: 13531 - RNA, 21 nt, Artificial Sequence
  SAMD9L targeting guide sequence portion
uacaguaacaggaucucccaa

SEQ ID NO: 13532 - RNA, 21 nt, Artificial Sequence
  SAMD9L targeting guide sequence portion
uacaucaagccuuuaguuaug

SEQ ID NO: 13533 - RNA, 21 nt, Artificial Sequence
  SAMD9L targeting guide sequence portion
uaccuggugguggggucagaa

SEQ ID NO: 13534 - RNA, 21 nt, Artificial Sequence
  SAMD9L targeting guide sequence portion
uacuaaauauuccugcuaacc

SEQ ID NO: 13535 - RNA, 21 nt, Artificial Sequence
  SAMD9L targeting guide sequence portion
uacuaaauguuauaguccagc

SEQ ID NO: 13536 - RNA, 21 nt, Artificial Sequence
  SAMD9L targeting guide sequence portion
uacuccccaaguuguucauag

SEQ ID NO: 13537 - RNA, 21 nt, Artificial Sequence
  SAMD9L targeting guide sequence portion
uacuguauggacugguggacu

SEQ ID NO: 13538 - RNA, 21 nt, Artificial Sequence
  SAMD9L targeting guide sequence portion
uagaaauauaggccagaagaa

SEQ ID NO: 13539 - RNA, 21 nt, Artificial Sequence
  SAMD9L targeting guide sequence portion
uagacuucuugaugacaagaa

SEQ ID NO: 13540 - RNA, 21 nt, Artificial Sequence
  SAMD9L targeting guide sequence portion
uagagaaaaaaguuauaauga

SEQ ID NO: 13541 - RNA, 21 nt, Artificial Sequence
  SAMD9L targeting guide sequence portion
uagagagcuuccuucuccuua

SEQ ID NO: 13542 - RNA, 21 nt, Artificial Sequence
  SAMD9L targeting guide sequence portion
uagagcauagacuucuugaug

SEQ ID NO: 13543 - RNA, 21 nt, Artificial Sequence
  SAMD9L targeting guide sequence portion
uagaguuaauaauucugaccc

SEQ ID NO: 13544 - RNA, 21 nt, Artificial Sequence
  SAMD9L targeting guide sequence portion
uagauauucuggacuccaaac

SEQ ID NO: 13545 - RNA, 21 nt, Artificial Sequence
  SAMD9L targeting guide sequence portion
uagcaggaauauuuaguaguu

SEQ ID NO: 13546 - RNA, 21 nt, Artificial Sequence
  SAMD9L targeting guide sequence portion
uagccacuugggagauccugu

SEQ ID NO: 13547 - RNA, 21 nt, Artificial Sequence
  SAMD9L targeting guide sequence portion
uaggaucaggccuaugucccc

SEQ ID NO: 13548 - RNA, 21 nt, Artificial Sequence
  SAMD9L targeting guide sequence portion
uaggccagaagaacccugaua

SEQ ID NO: 13549 - RNA, 21 nt, Artificial Sequence
  SAMD9L targeting guide sequence portion
uaggccugauccuauuucuuu

SEQ ID NO: 13550 - RNA, 21 nt, Artificial Sequence
  SAMD9L targeting guide sequence portion
uaggccuggggacauaggccu

SEQ ID NO: 13551 - RNA, 21 nt, Artificial Sequence
  SAMD9L targeting guide sequence portion
uaguaagacauaacuaaaggc

SEQ ID NO: 13552 - RNA, 21 nt, Artificial Sequence
  SAMD9L targeting guide sequence portion
uaguaguuuuuccuccuuuca

SEQ ID NO: 13553 - RNA, 21 nt, Artificial Sequence
  SAMD9L targeting guide sequence portion
uaguccagcaggggaguuuaa

SEQ ID NO: 13554 - RNA, 21 nt, Artificial Sequence
  SAMD9L targeting guide sequence portion
uaguuaugucuuacuaaaugu

SEQ ID NO: 13555 - RNA, 21 nt, Artificial Sequence
  SAMD9L targeting guide sequence portion
uaguuuuuccuccuuucauua

SEQ ID NO: 13556 - RNA, 21 nt, Artificial Sequence
  SAMD9L targeting guide sequence portion
uauaacauuuaguaagacaua

SEQ ID NO: 13557 - RNA, 21 nt, Artificial Sequence
  SAMD9L targeting guide sequence portion
uauaacuuuuuucucuacauc

SEQ ID NO: 13558 - RNA, 21 nt, Artificial Sequence
  SAMD9L targeting guide sequence portion
uauaaugaaaggaggaaaaac

SEQ ID NO: 13559 - RNA, 21 nt, Artificial Sequence
  SAMD9L targeting guide sequence portion
uauacuccccaaguuguucau

SEQ ID NO: 13560 - RNA, 21 nt, Artificial Sequence
  SAMD9L targeting guide sequence portion
uauagccacuugggagauccu

SEQ ID NO: 13561 - RNA, 21 nt, Artificial Sequence
  SAMD9L targeting guide sequence portion
uauaggccagaagaacccuga

SEQ ID NO: 13562 - RNA, 21 nt, Artificial Sequence
  SAMD9L targeting guide sequence portion
uauaguccagcaggggaguuu

SEQ ID NO: 13563 - RNA, 21 nt, Artificial Sequence
  SAMD9L targeting guide sequence portion
uauauuucuaugaaucugggc

SEQ ID NO: 13564 - RNA, 21 nt, Artificial Sequence
  SAMD9L targeting guide sequence portion
uaucaggguucuucuggccua

SEQ ID NO: 13565 - RNA, 21 nt, Artificial Sequence
  SAMD9L targeting guide sequence portion
uaucuaaguuacauuacaaag

SEQ ID NO: 13566 - RNA, 21 nt, Artificial Sequence
  SAMD9L targeting guide sequence portion
uaucucuuuguaauguaacuu

SEQ ID NO: 13567 - RNA, 21 nt, Artificial Sequence
  SAMD9L targeting guide sequence portion
uaucuuagagagcuuccuucu

SEQ ID NO: 13568 - RNA, 21 nt, Artificial Sequence
  SAMD9L targeting guide sequence portion
uaucuuuagaguuaauaauuc

SEQ ID NO: 13569 - RNA, 21 nt, Artificial Sequence
  SAMD9L targeting guide sequence portion
uaugaacaacuuggggaguau

SEQ ID NO: 13570 - RNA, 21 nt, Artificial Sequence
  SAMD9L targeting guide sequence portion
uaugaaucugggcaacgcuca

SEQ ID NO: 13571 - RNA, 21 nt, Artificial Sequence
  SAMD9L targeting guide sequence portion
uaugcucuaucaggguucuuc

SEQ ID NO: 13572 - RNA, 21 nt, Artificial Sequence
  SAMD9L targeting guide sequence portion
uauggacugguggacugcaga

SEQ ID NO: 13573 - RNA, 21 nt, Artificial Sequence
  SAMD9L targeting guide sequence portion
uaugguuagcaggaauauuua

SEQ ID NO: 13574 - RNA, 21 nt, Artificial Sequence
  SAMD9L targeting guide sequence portion
uauguccccaggccuaugaac

SEQ ID NO: 13575 - RNA, 21 nt, Artificial Sequence
  SAMD9L targeting guide sequence portion
uaugucuuacuaaauguuaua

SEQ ID NO: 13576 - RNA, 21 nt, Artificial Sequence
  SAMD9L targeting guide sequence portion
uauuaacucuaaagauaauua

SEQ ID NO: 13577 - RNA, 21 nt, Artificial Sequence
  SAMD9L targeting guide sequence portion
uauuccugcuaaccauaauua

SEQ ID NO: 13578 - RNA, 21 nt, Artificial Sequence
  SAMD9L targeting guide sequence portion
uauucuggacuccaaacccaa

SEQ ID NO: 13579 - RNA, 21 nt, Artificial Sequence
  SAMD9L targeting guide sequence portion
uauuuaguaguuuuuccuccu

SEQ ID NO: 13580 - RNA, 21 nt, Artificial Sequence
  SAMD9L targeting guide sequence portion
uauuucuaugaaucugggcaa

SEQ ID NO: 13581 - RNA, 21 nt, Artificial Sequence
  SAMD9L targeting guide sequence portion
uauuucuuuuaaacuccccug

SEQ ID NO: 13582 - RNA, 21 nt, Artificial Sequence
  SAMD9L targeting guide sequence portion
ucaagaagucuaugcucuauc

SEQ ID NO: 13583 - RNA, 21 nt, Artificial Sequence
  SAMD9L targeting guide sequence portion
ucaagccuuuaguuaugucuu

SEQ ID NO: 13584 - RNA, 21 nt, Artificial Sequence
  SAMD9L targeting guide sequence portion
ucacaugguccagaacauguc

SEQ ID NO: 13585 - RNA, 21 nt, Artificial Sequence
  SAMD9L targeting guide sequence portion
ucagaaagagggacauguucu

SEQ ID NO: 13586 - RNA, 21 nt, Artificial Sequence
  SAMD9L targeting guide sequence portion
ucagaauuauuaacucuaaag

SEQ ID NO: 13587 - RNA, 21 nt, Artificial Sequence
  SAMD9L targeting guide sequence portion
ucagcagcagacacagcuuuc

SEQ ID NO: 13588 - RNA, 21 nt, Artificial Sequence
  SAMD9L targeting guide sequence portion
ucaggccuauguccccaggcc

SEQ ID NO: 13589 - RNA, 21 nt, Artificial Sequence
  SAMD9L targeting guide sequence portion
ucaggguucuucuggccuaua

SEQ ID NO: 13590 - RNA, 21 nt, Artificial Sequence
  SAMD9L targeting guide sequence portion
ucauagaaauauaggccagaa

SEQ ID NO: 13591 - RNA, 21 nt, Artificial Sequence
  SAMD9L targeting guide sequence portion
ucauaggccuggggacauagg

SEQ ID NO: 13592 - RNA, 21 nt, Artificial Sequence
  SAMD9L targeting guide sequence portion
ucaucaagaagucuaugcucu

SEQ ID NO: 13593 - RNA, 21 nt, Artificial Sequence
  SAMD9L targeting guide sequence portion
ucauuauaacuuuuuucucua

SEQ ID NO: 13594 - RNA, 21 nt, Artificial Sequence
  SAMD9L targeting guide sequence portion
uccaaacaguugccucccucu

SEQ ID NO: 13595 - RNA, 21 nt, Artificial Sequence
  SAMD9L targeting guide sequence portion
uccaaacccaauucuucuugu

SEQ ID NO: 13596 - RNA, 21 nt, Artificial Sequence
  SAMD9L targeting guide sequence portion
uccaccaguccauacaguaac

SEQ ID NO: 13597 - RNA, 21 nt, Artificial Sequence
  SAMD9L targeting guide sequence portion
uccagaacaugucccucuuuc

SEQ ID NO: 13598 - RNA, 21 nt, Artificial Sequence
  SAMD9L targeting guide sequence portion
uccagaauaucuaaguuacau

SEQ ID NO: 13599 - RNA, 21 nt, Artificial Sequence
  SAMD9L targeting guide sequence portion
uccagcaggggaguuuaaaag

SEQ ID NO: 13600 - RNA, 21 nt, Artificial Sequence
  SAMD9L targeting guide sequence portion
uccauacaguaacaggaucuc

SEQ ID NO: 13601 - RNA, 21 nt, Artificial Sequence
  SAMD9L targeting guide sequence portion
ucccaaguggcuauacucccc

SEQ ID NO: 13602 - RNA, 21 nt, Artificial Sequence
  SAMD9L targeting guide sequence portion
uccccaaguuguucauaggcc

SEQ ID NO: 13603 - RNA, 21 nt, Artificial Sequence
  SAMD9L targeting guide sequence portion
uccccaggccuaugaacaacu

SEQ ID NO: 13604 - RNA, 21 nt, Artificial Sequence
  SAMD9L targeting guide sequence portion
uccccugcuggacuauaacau

SEQ ID NO: 13605 - RNA, 21 nt, Artificial Sequence
  SAMD9L targeting guide sequence portion
ucccucuucugcaguccacca

SEQ ID NO: 13606 - RNA, 21 nt, Artificial Sequence
  SAMD9L targeting guide sequence portion
ucccucuuucugaaagcugug

SEQ ID NO: 13607 - RNA, 21 nt, Artificial Sequence
  SAMD9L targeting guide sequence portion
uccuauuucuuuuaaacuccc

SEQ ID NO: 13608 - RNA, 21 nt, Artificial Sequence
  SAMD9L targeting guide sequence portion
uccuccuuucauuauaacuuu

SEQ ID NO: 13609 - RNA, 21 nt, Artificial Sequence
  SAMD9L targeting guide sequence portion
uccugcuaaccauaauuaucu

SEQ ID NO: 13610 - RNA, 21 nt, Artificial Sequence
  SAMD9L targeting guide sequence portion
uccuguuacuguauggacugg

SEQ ID NO: 13611 - RNA, 21 nt, Artificial Sequence
  SAMD9L targeting guide sequence portion
uccuucuccuuagcccccauu

SEQ ID NO: 13612 - RNA, 21 nt, Artificial Sequence
  SAMD9L targeting guide sequence portion
uccuuucauuauaacuuuuuu

SEQ ID NO: 13613 - RNA, 21 nt, Artificial Sequence
  SAMD9L targeting guide sequence portion
ucuaaagauaauuaugguuag

SEQ ID NO: 13614 - RNA, 21 nt, Artificial Sequence
  SAMD9L targeting guide sequence portion
ucuaagauaccuggugguggg

SEQ ID NO: 13615 - RNA, 21 nt, Artificial Sequence
  SAMD9L targeting guide sequence portion
ucuaaguuacauuacaaagag

SEQ ID NO: 13616 - RNA, 21 nt, Artificial Sequence
  SAMD9L targeting guide sequence portion
ucuacaucaagccuuuaguua

SEQ ID NO: 13617 - RNA, 21 nt, Artificial Sequence
  SAMD9L targeting guide sequence portion
ucuaucaggguucuucuggcc

SEQ ID NO: 13618 - RNA, 21 nt, Artificial Sequence
  SAMD9L targeting guide sequence portion
ucuaugaaucugggcaacgcu

SEQ ID NO: 13619 - RNA, 21 nt, Artificial Sequence
  SAMD9L targeting guide sequence portion
ucuaugcucuaucaggguucu

SEQ ID NO: 13620 - RNA, 21 nt, Artificial Sequence
  SAMD9L targeting guide sequence portion
ucucccaaguggcuauacucc

SEQ ID NO: 13621 - RNA, 21 nt, Artificial Sequence
  SAMD9L targeting guide sequence portion
ucucuaagauaccugguggug

SEQ ID NO: 13622 - RNA, 21 nt, Artificial Sequence
  SAMD9L targeting guide sequence portion
ucucuacaucaagccuuuagu

SEQ ID NO: 13623 - RNA, 21 nt, Artificial Sequence
  SAMD9L targeting guide sequence portion
ucucuuuguaauguaacuuag

SEQ ID NO: 13624 - RNA, 21 nt, Artificial Sequence
  SAMD9L targeting guide sequence portion
ucugaaagcugugucugcugc

SEQ ID NO: 13625 - RNA, 21 nt, Artificial Sequence
  SAMD9L targeting guide sequence portion
ucugaccccaccaccagguau

SEQ ID NO: 13626 - RNA, 21 nt, Artificial Sequence
  SAMD9L targeting guide sequence portion
ucugcaguccaccaguccaua

SEQ ID NO: 13627 - RNA, 21 nt, Artificial Sequence
  SAMD9L targeting guide sequence portion
ucugcugcugacccugcucca

SEQ ID NO: 13628 - RNA, 21 nt, Artificial Sequence
  SAMD9L targeting guide sequence portion
ucuggaccaugugagcguugc

SEQ ID NO: 13629 - RNA, 21 nt, Artificial Sequence
  SAMD9L targeting guide sequence portion
ucuggacuccaaacccaauuc

SEQ ID NO: 13630 - RNA, 21 nt, Artificial Sequence
  SAMD9L targeting guide sequence portion
ucuggccuauauuucuaugaa

SEQ ID NO: 13631 - RNA, 21 nt, Artificial Sequence
  SAMD9L targeting guide sequence portion
ucugggcaacgcucacauggu

SEQ ID NO: 13632 - RNA, 21 nt, Artificial Sequence
  SAMD9L targeting guide sequence portion
ucuuacuaaauguuauagucc

SEQ ID NO: 13633 - RNA, 21 nt, Artificial Sequence
  SAMD9L targeting guide sequence portion
ucuuagagagcuuccuucucc

SEQ ID NO: 13634 - RNA, 21 nt, Artificial Sequence
  SAMD9L targeting guide sequence portion
ucuucugcaguccaccagucc

SEQ ID NO: 13635 - RNA, 21 nt, Artificial Sequence
  SAMD9L targeting guide sequence portion
ucuucuggccuauauuucuau

SEQ ID NO: 13636 - RNA, 21 nt, Artificial Sequence
  SAMD9L targeting guide sequence portion
ucuucuugucaucaagaaguc

SEQ ID NO: 13637 - RNA, 21 nt, Artificial Sequence
  SAMD9L targeting guide sequence portion
ucuugaugacaagaagaauug

SEQ ID NO: 13638 - RNA, 21 nt, Artificial Sequence
  SAMD9L targeting guide sequence portion
ucuugucaucaagaagucuau

SEQ ID NO: 13639 - RNA, 21 nt, Artificial Sequence
  SAMD9L targeting guide sequence portion
ucuuuagaguuaauaauucug

SEQ ID NO: 13640 - RNA, 21 nt, Artificial Sequence
  SAMD9L targeting guide sequence portion
ucuuucugaaagcugugucug

SEQ ID NO: 13641 - RNA, 21 nt, Artificial Sequence
  SAMD9L targeting guide sequence portion
ucuuuguaauguaacuuagau

SEQ ID NO: 13642 - RNA, 21 nt, Artificial Sequence
  SAMD9L targeting guide sequence portion
ucuuuguaucucuuuguaaug

SEQ ID NO: 13643 - RNA, 21 nt, Artificial Sequence
  SAMD9L targeting guide sequence portion
ucuuuuaaacuccccugcugg

SEQ ID NO: 13644 - RNA, 21 nt, Artificial Sequence
  SAMD9L targeting guide sequence portion
ugaaagcugugucugcugcug

SEQ ID NO: 13645 - RNA, 21 nt, Artificial Sequence
  SAMD9L targeting guide sequence portion
ugaaaggaggaaaaacuacua

SEQ ID NO: 13646 - RNA, 21 nt, Artificial Sequence
  SAMD9L targeting guide sequence portion
ugaaaugggggcuaaggagaa

SEQ ID NO: 13647 - RNA, 21 nt, Artificial Sequence
  SAMD9L targeting guide sequence portion
ugaacaacuuggggaguauag

SEQ ID NO: 13648 - RNA, 21 nt, Artificial Sequence
  SAMD9L targeting guide sequence portion
ugaaucugggcaacgcucaca

SEQ ID NO: 13649 - RNA, 21 nt, Artificial Sequence
  SAMD9L targeting guide sequence portion
ugacaagaagaauuggguuug

SEQ ID NO: 13650 - RNA, 21 nt, Artificial Sequence
  SAMD9L targeting guide sequence portion
ugaccccaccaccagguaucu

SEQ ID NO: 13651 - RNA, 21 nt, Artificial Sequence
  SAMD9L targeting guide sequence portion
ugacccugcuccaaacaguug

SEQ ID NO: 13652 - RNA, 21 nt, Artificial Sequence
  SAMD9L targeting guide sequence portion
ugagcguugcccagauucaua

SEQ ID NO: 13653 - RNA, 21 nt, Artificial Sequence
  SAMD9L targeting guide sequence portion
ugauagagcauagacuucuug

SEQ ID NO: 13654 - RNA, 21 nt, Artificial Sequence
  SAMD9L targeting guide sequence portion
ugauccuauuucuuuuaaacu

SEQ ID NO: 13655 - RNA, 21 nt, Artificial Sequence
  SAMD9L targeting guide sequence portion
ugaugacaagaagaauugggu

SEQ ID NO: 13656 - RNA, 21 nt, Artificial Sequence
  SAMD9L targeting guide sequence portion
ugauguagagaaaaaaguuau

SEQ ID NO: 13657 - RNA, 21 nt, Artificial Sequence
  SAMD9L targeting guide sequence portion
ugcagaagagggaggcaacug

SEQ ID NO: 13658 - RNA, 21 nt, Artificial Sequence
  SAMD9L targeting guide sequence portion
ugcaguccaccaguccauaca

SEQ ID NO: 13659 - RNA, 21 nt, Artificial Sequence
  SAMD9L targeting guide sequence portion
ugcccagauucauagaaauau

SEQ ID NO: 13660 - RNA, 21 nt, Artificial Sequence
  SAMD9L targeting guide sequence portion
ugccucccucuucugcagucc

SEQ ID NO: 13661 - RNA, 21 nt, Artificial Sequence
  SAMD9L targeting guide sequence portion
ugcuaaccauaauuaucuuua

SEQ ID NO: 13662 - RNA, 21 nt, Artificial Sequence
  SAMD9L targeting guide sequence portion
ugcuccaaacaguugccuccc

SEQ ID NO: 13663 - RNA, 21 nt, Artificial Sequence
  SAMD9L targeting guide sequence portion
ugcucuaucaggguucuucug

SEQ ID NO: 13664 - RNA, 21 nt, Artificial Sequence
  SAMD9L targeting guide sequence portion
ugcugacccugcuccaaacag

SEQ ID NO: 13665 - RNA, 21 nt, Artificial Sequence
  SAMD9L targeting guide sequence portion
ugcugcugacccugcuccaaa

SEQ ID NO: 13666 - RNA, 21 nt, Artificial Sequence
  SAMD9L targeting guide sequence portion
ugcuggacuauaacauuuagu

SEQ ID NO: 13667 - RNA, 21 nt, Artificial Sequence
  SAMD9L targeting guide sequence portion
uggaccaugugagcguugccc

SEQ ID NO: 13668 - RNA, 21 nt, Artificial Sequence
  SAMD9L targeting guide sequence portion
uggacuauaacauuuaguaag

SEQ ID NO: 13669 - RNA, 21 nt, Artificial Sequence
  SAMD9L targeting guide sequence portion
uggacuccaaacccaauucuu

SEQ ID NO: 13670 - RNA, 21 nt, Artificial Sequence
  SAMD9L targeting guide sequence portion
uggacugcagaagagggaggc

SEQ ID NO: 13671 - RNA, 21 nt, Artificial Sequence
  SAMD9L targeting guide sequence portion
uggacugguggacugcagaag

SEQ ID NO: 13672 - RNA, 21 nt, Artificial Sequence
  SAMD9L targeting guide sequence portion
uggagcagggucagcagcaga

SEQ ID NO: 13673 - RNA, 21 nt, Artificial Sequence
  SAMD9L targeting guide sequence portion
uggaguccagaauaucuaagu

SEQ ID NO: 13674 - RNA, 21 nt, Artificial Sequence
  SAMD9L targeting guide sequence portion
uggccuauauuucuaugaauc

SEQ ID NO: 13675 - RNA, 21 nt, Artificial Sequence
  SAMD9L targeting guide sequence portion
uggcuauacuccccaaguugu

SEQ ID NO: 13676 - RNA, 21 nt, Artificial Sequence
  SAMD9L targeting guide sequence portion
ugggagauccuguuacuguau

SEQ ID NO: 13677 - RNA, 21 nt, Artificial Sequence
  SAMD9L targeting guide sequence portion
ugggcaacgcucacauggucc

SEQ ID NO: 13678 - RNA, 21 nt, Artificial Sequence
  SAMD9L targeting guide sequence portion
uggggacauaggccugauccu

SEQ ID NO: 13679 - RNA, 21 nt, Artificial Sequence
  SAMD9L targeting guide sequence portion
uggggaguauagccacuuggg

SEQ ID NO: 13680 - RNA, 21 nt, Artificial Sequence
  SAMD9L targeting guide sequence portion
ugggggcuaaggagaaggaag

SEQ ID NO: 13681 - RNA, 21 nt, Artificial Sequence
  SAMD9L targeting guide sequence portion
uggggucagaauuauuaacuc

SEQ ID NO: 13682 - RNA, 21 nt, Artificial Sequence
  SAMD9L targeting guide sequence portion
uggguuuggaguccagaauau

SEQ ID NO: 13683 - RNA, 21 nt, Artificial Sequence
  SAMD9L targeting guide sequence portion
ugguccagaacaugucccucu

SEQ ID NO: 13684 - RNA, 21 nt, Artificial Sequence
  SAMD9L targeting guide sequence portion
ugguggacugcagaagaggga

SEQ ID NO: 13685 - RNA, 21 nt, Artificial Sequence
  SAMD9L targeting guide sequence portion
ugguggggucagaauuauuaa

SEQ ID NO: 13686 - RNA, 21 nt, Artificial Sequence
  SAMD9L targeting guide sequence portion
uggugguggggucagaauuau

SEQ ID NO: 13687 - RNA, 21 nt, Artificial Sequence
  SAMD9L targeting guide sequence portion
ugguuagcaggaauauuuagu

SEQ ID NO: 13688 - RNA, 21 nt, Artificial Sequence
  SAMD9L targeting guide sequence portion
uguaacuuagauauucuggac

SEQ ID NO: 13689 - RNA, 21 nt, Artificial Sequence
  SAMD9L targeting guide sequence portion
uguaauguaacuuagauauuc

SEQ ID NO: 13690 - RNA, 21 nt, Artificial Sequence
  SAMD9L targeting guide sequence portion
uguagagaaaaaaguuauaau

SEQ ID NO: 13691 - RNA, 21 nt, Artificial Sequence
  SAMD9L targeting guide sequence portion
uguaucucuuuguaauguaac

SEQ ID NO: 13692 - RNA, 21 nt, Artificial Sequence
  SAMD9L targeting guide sequence portion
uguauggacugguggacugca

SEQ ID NO: 13693 - RNA, 21 nt, Artificial Sequence
  SAMD9L targeting guide sequence portion
ugucaucaagaagucuaugcu

SEQ ID NO: 13694 - RNA, 21 nt, Artificial Sequence
  SAMD9L targeting guide sequence portion
uguccccaggccuaugaacaa

SEQ ID NO: 13695 - RNA, 21 nt, Artificial Sequence
  SAMD9L targeting guide sequence portion
ugucccucuuucugaaagcug

SEQ ID NO: 13696 - RNA, 21 nt, Artificial Sequence
  SAMD9L targeting guide sequence portion
ugucugcugcugacccugcuc

SEQ ID NO: 13697 - RNA, 21 nt, Artificial Sequence
  SAMD9L targeting guide sequence portion
ugucuuacuaaauguuauagu

SEQ ID NO: 13698 - RNA, 21 nt, Artificial Sequence
  SAMD9L targeting guide sequence portion
ugugagcguugcccagauuca

SEQ ID NO: 13699 - RNA, 21 nt, Artificial Sequence
  SAMD9L targeting guide sequence portion
ugugucugcugcugacccugc

SEQ ID NO: 13700 - RNA, 21 nt, Artificial Sequence
  SAMD9L targeting guide sequence portion
uguuacuguauggacuggugg

SEQ ID NO: 13701 - RNA, 21 nt, Artificial Sequence
  SAMD9L targeting guide sequence portion
uguuauaguccagcaggggag

SEQ ID NO: 13702 - RNA, 21 nt, Artificial Sequence
  SAMD9L targeting guide sequence portion
uguucauaggccuggggacau

SEQ ID NO: 13703 - RNA, 21 nt, Artificial Sequence
  SAMD9L targeting guide sequence portion
uguucuggaccaugugagcgu

SEQ ID NO: 13704 - RNA, 21 nt, Artificial Sequence
  SAMD9L targeting guide sequence portion
uguugaaaugggggcuaagga

SEQ ID NO: 13705 - RNA, 21 nt, Artificial Sequence
  SAMD9L targeting guide sequence portion
uguuuggagcagggucagcag

SEQ ID NO: 13706 - RNA, 21 nt, Artificial Sequence
  SAMD9L targeting guide sequence portion
uuaaaagaaauaggaucaggc

SEQ ID NO: 13707 - RNA, 21 nt, Artificial Sequence
  SAMD9L targeting guide sequence portion
uuaaacuccccugcuggacua

SEQ ID NO: 13708 - RNA, 21 nt, Artificial Sequence
  SAMD9L targeting guide sequence portion
uuaacucuaaagauaauuaug

SEQ ID NO: 13709 - RNA, 21 nt, Artificial Sequence
  SAMD9L targeting guide sequence portion
uuaauaauucugaccccacca

SEQ ID NO: 13710 - RNA, 21 nt, Artificial Sequence
  SAMD9L targeting guide sequence portion
uuacauuacaaagagauacaa

SEQ ID NO: 13711 - RNA, 21 nt, Artificial Sequence
  SAMD9L targeting guide sequence portion
uuacuaaauguuauaguccag

SEQ ID NO: 13712 - RNA, 21 nt, Artificial Sequence
  SAMD9L targeting guide sequence portion
uuacuguauggacugguggac

SEQ ID NO: 13713 - RNA, 21 nt, Artificial Sequence
  SAMD9L targeting guide sequence portion
uuagagagcuuccuucuccuu

SEQ ID NO: 13714 - RNA, 21 nt, Artificial Sequence
  SAMD9L targeting guide sequence portion
uuagaguuaauaauucugacc

SEQ ID NO: 13715 - RNA, 21 nt, Artificial Sequence
  SAMD9L targeting guide sequence portion
uuagauauucuggacuccaaa

SEQ ID NO: 13716 - RNA, 21 nt, Artificial Sequence
  SAMD9L targeting guide sequence portion
uuagcaggaauauuuaguagu

SEQ ID NO: 13717 - RNA, 21 nt, Artificial Sequence
  SAMD9L targeting guide sequence portion
uuaguaagacauaacuaaagg

SEQ ID NO: 13718 - RNA, 21 nt, Artificial Sequence
  SAMD9L targeting guide sequence portion
uuaguaguuuuuccuccuuuc

SEQ ID NO: 13719 - RNA, 21 nt, Artificial Sequence
  SAMD9L targeting guide sequence portion
uuaguuaugucuuacuaaaug

SEQ ID NO: 13720 - RNA, 21 nt, Artificial Sequence
  SAMD9L targeting guide sequence portion
uuauaacuuuuuucucuacau

SEQ ID NO: 13721 - RNA, 21 nt, Artificial Sequence
  SAMD9L targeting guide sequence portion
uuauaaugaaaggaggaaaaa

SEQ ID NO: 13722 - RNA, 21 nt, Artificial Sequence
  SAMD9L targeting guide sequence portion
uuauaguccagcaggggaguu

SEQ ID NO: 13723 - RNA, 21 nt, Artificial Sequence
  SAMD9L targeting guide sequence portion
uuaucuuuagaguuaauaauu

SEQ ID NO: 13724 - RNA, 21 nt, Artificial Sequence
  SAMD9L targeting guide sequence portion
uuaugguuagcaggaauauuu

SEQ ID NO: 13725 - RNA, 21 nt, Artificial Sequence
  SAMD9L targeting guide sequence portion
uuaugucuuacuaaauguuau

SEQ ID NO: 13726 - RNA, 21 nt, Artificial Sequence
  SAMD9L targeting guide sequence portion
uuauuaacucuaaagauaauu

SEQ ID NO: 13727 - RNA, 21 nt, Artificial Sequence
  SAMD9L targeting guide sequence portion
uucagaaagagggacauguuc

SEQ ID NO: 13728 - RNA, 21 nt, Artificial Sequence
  SAMD9L targeting guide sequence portion
uucauagaaauauaggccaga

SEQ ID NO: 13729 - RNA, 21 nt, Artificial Sequence
  SAMD9L targeting guide sequence portion
uucauaggccuggggacauag

SEQ ID NO: 13730 - RNA, 21 nt, Artificial Sequence
  SAMD9L targeting guide sequence portion
uucauuauaacuuuuuucucu

SEQ ID NO: 13731 - RNA, 21 nt, Artificial Sequence
  SAMD9L targeting guide sequence portion
uuccuccuuucauuauaacuu

SEQ ID NO: 13732 - RNA, 21 nt, Artificial Sequence
  SAMD9L targeting guide sequence portion
uuccugcuaaccauaauuauc

SEQ ID NO: 13733 - RNA, 21 nt, Artificial Sequence
  SAMD9L targeting guide sequence portion
uuccuucuccuuagcccccau

SEQ ID NO: 13734 - RNA, 21 nt, Artificial Sequence
  SAMD9L targeting guide sequence portion
uucuaugaaucugggcaacgc

SEQ ID NO: 13735 - RNA, 21 nt, Artificial Sequence
  SAMD9L targeting guide sequence portion
uucuccuuagcccccauuuca

SEQ ID NO: 13736 - RNA, 21 nt, Artificial Sequence
  SAMD9L targeting guide sequence portion
uucucuacaucaagccuuuag

SEQ ID NO: 13737 - RNA, 21 nt, Artificial Sequence
  SAMD9L targeting guide sequence portion
uucugaaagcugugucugcug

SEQ ID NO: 13738 - RNA, 21 nt, Artificial Sequence
  SAMD9L targeting guide sequence portion
uucugaccccaccaccaggua

SEQ ID NO: 13739 - RNA, 21 nt, Artificial Sequence
  SAMD9L targeting guide sequence portion
uucugcaguccaccaguccau

SEQ ID NO: 13740 - RNA, 21 nt, Artificial Sequence
  SAMD9L targeting guide sequence portion
uucuggaccaugugagcguug

SEQ ID NO: 13741 - RNA, 21 nt, Artificial Sequence
  SAMD9L targeting guide sequence portion
uucuggacuccaaacccaauu

SEQ ID NO: 13742 - RNA, 21 nt, Artificial Sequence
  SAMD9L targeting guide sequence portion
uucuggccuauauuucuauga

SEQ ID NO: 13743 - RNA, 21 nt, Artificial Sequence
  SAMD9L targeting guide sequence portion
uucuucuggccuauauuucua

SEQ ID NO: 13744 - RNA, 21 nt, Artificial Sequence
  SAMD9L targeting guide sequence portion
uucuucuugucaucaagaagu

SEQ ID NO: 13745 - RNA, 21 nt, Artificial Sequence
  SAMD9L targeting guide sequence portion
uucuugaugacaagaagaauu

SEQ ID NO: 13746 - RNA, 21 nt, Artificial Sequence
  SAMD9L targeting guide sequence portion
uucuugucaucaagaagucua

SEQ ID NO: 13747 - RNA, 21 nt, Artificial Sequence
  SAMD9L targeting guide sequence portion
uucuuuuaaacuccccugcug

SEQ ID NO: 13748 - RNA, 21 nt, Artificial Sequence
  SAMD9L targeting guide sequence portion
uugaaaugggggcuaaggaga

SEQ ID NO: 13749 - RNA, 21 nt, Artificial Sequence
  SAMD9L targeting guide sequence portion
uugaugacaagaagaauuggg

SEQ ID NO: 13750 - RNA, 21 nt, Artificial Sequence
  SAMD9L targeting guide sequence portion
uugauguagagaaaaaaguua

SEQ ID NO: 13751 - RNA, 21 nt, Artificial Sequence
  SAMD9L targeting guide sequence portion
uugcccagauucauagaaaua

SEQ ID NO: 13752 - RNA, 21 nt, Artificial Sequence
  SAMD9L targeting guide sequence portion
uugccucccucuucugcaguc

SEQ ID NO: 13753 - RNA, 21 nt, Artificial Sequence
  SAMD9L targeting guide sequence portion
uuggagcagggucagcagcag

SEQ ID NO: 13754 - RNA, 21 nt, Artificial Sequence
  SAMD9L targeting guide sequence portion
uuggaguccagaauaucuaag

SEQ ID NO: 13755 - RNA, 21 nt, Artificial Sequence
  SAMD9L targeting guide sequence portion
uugggagauccuguuacugua

SEQ ID NO: 13756 - RNA, 21 nt, Artificial Sequence
  SAMD9L targeting guide sequence portion
uuggggaguauagccacuugg

SEQ ID NO: 13757 - RNA, 21 nt, Artificial Sequence
  SAMD9L targeting guide sequence portion
uuggguuuggaguccagaaua

SEQ ID NO: 13758 - RNA, 21 nt, Artificial Sequence
  SAMD9L targeting guide sequence portion
uuguaauguaacuuagauauu

SEQ ID NO: 13759 - RNA, 21 nt, Artificial Sequence
  SAMD9L targeting guide sequence portion
uuguaucucuuuguaauguaa

SEQ ID NO: 13760 - RNA, 21 nt, Artificial Sequence
  SAMD9L targeting guide sequence portion
uugucaucaagaagucuaugc

SEQ ID NO: 13761 - RNA, 21 nt, Artificial Sequence
  SAMD9L targeting guide sequence portion
uuguucauaggccuggggaca

SEQ ID NO: 13762 - RNA, 21 nt, Artificial Sequence
  SAMD9L targeting guide sequence portion
uuuaaaagaaauaggaucagg

SEQ ID NO: 13763 - RNA, 21 nt, Artificial Sequence
  SAMD9L targeting guide sequence portion
uuuaaacuccccugcuggacu

SEQ ID NO: 13764 - RNA, 21 nt, Artificial Sequence
  SAMD9L targeting guide sequence portion
uuuagaguuaauaauucugac

SEQ ID NO: 13765 - RNA, 21 nt, Artificial Sequence
  SAMD9L targeting guide sequence portion
uuuaguaagacauaacuaaag

SEQ ID NO: 13766 - RNA, 21 nt, Artificial Sequence
  SAMD9L targeting guide sequence portion
uuuaguaguuuuuccuccuuu

SEQ ID NO: 13767 - RNA, 21 nt, Artificial Sequence
  SAMD9L targeting guide sequence portion
uuuaguuaugucuuacuaaau

SEQ ID NO: 13768 - RNA, 21 nt, Artificial Sequence
  SAMD9L targeting guide sequence portion
uuucagaaagagggacauguu

SEQ ID NO: 13769 - RNA, 21 nt, Artificial Sequence
  SAMD9L targeting guide sequence portion
uuucauuauaacuuuuuucuc

SEQ ID NO: 13770 - RNA, 21 nt, Artificial Sequence
  SAMD9L targeting guide sequence portion
uuuccuccuuucauuauaacu

SEQ ID NO: 13771 - RNA, 21 nt, Artificial Sequence
  SAMD9L targeting guide sequence portion
uuucuaugaaucugggcaacg

SEQ ID NO: 13772 - RNA, 21 nt, Artificial Sequence
  SAMD9L targeting guide sequence portion
uuucucuacaucaagccuuua

SEQ ID NO: 13773 - RNA, 21 nt, Artificial Sequence
  SAMD9L targeting guide sequence portion
uuucugaaagcugugucugcu

SEQ ID NO: 13774 - RNA, 21 nt, Artificial Sequence
  SAMD9L targeting guide sequence portion
uuucuuuuaaacuccccugcu

SEQ ID NO: 13775 - RNA, 21 nt, Artificial Sequence
  SAMD9L targeting guide sequence portion
uuuggagcagggucagcagca

SEQ ID NO: 13776 - RNA, 21 nt, Artificial Sequence
  SAMD9L targeting guide sequence portion
uuuggaguccagaauaucuaa

SEQ ID NO: 13777 - RNA, 21 nt, Artificial Sequence
  SAMD9L targeting guide sequence portion
uuuguaauguaacuuagauau

SEQ ID NO: 13778 - RNA, 21 nt, Artificial Sequence
  SAMD9L targeting guide sequence portion
uuuguaucucuuuguaaugua

SEQ ID NO: 13779 - RNA, 21 nt, Artificial Sequence
  SAMD9L targeting guide sequence portion
uuuuaaacuccccugcuggac

SEQ ID NO: 13780 - RNA, 21 nt, Artificial Sequence
  SAMD9L targeting guide sequence portion
uuuuccuccuuucauuauaac

SEQ ID NO: 13781 - RNA, 21 nt, Artificial Sequence
  SAMD9L targeting guide sequence portion
uuuucucuacaucaagccuuu

SEQ ID NO: 13782 - RNA, 21 nt, Artificial Sequence
  SAMD9L targeting guide sequence portion
uuuuuccuccuuucauuauaa

SEQ ID NO: 13783 - RNA, 21 nt, Artificial Sequence
  SAMD9L targeting guide sequence portion
uuuuucucuacaucaagccuu

SEQ ID NO: 13784 - RNA, 21 nt, Artificial Sequence
  SAMD9L targeting guide sequence portion
uuuuuucucuacaucaagccu

SEQ ID NO: 13785 - RNA, 22 nt, Artificial Sequence
  SAMD9L targeting guide sequence portion
aaaaaaguuauaaugaaaggag

SEQ ID NO: 13786 - RNA, 22 nt, Artificial Sequence
  SAMD9L targeting guide sequence portion
aaaaacuacuaaauauuccugc

SEQ ID NO: 13787 - RNA, 22 nt, Artificial Sequence
  SAMD9L targeting guide sequence portion
aaaaaguuauaaugaaaggagg

SEQ ID NO: 13788 - RNA, 22 nt, Artificial Sequence
  SAMD9L targeting guide sequence portion
aaaacuacuaaauauuccugcu

SEQ ID NO: 13789 - RNA, 22 nt, Artificial Sequence
  SAMD9L targeting guide sequence portion
aaaagaaauaggaucaggccua

SEQ ID NO: 13790 - RNA, 22 nt, Artificial Sequence
  SAMD9L targeting guide sequence portion
aaaaguuauaaugaaaggagga

SEQ ID NO: 13791 - RNA, 22 nt, Artificial Sequence
  SAMD9L targeting guide sequence portion
aaacaguugccucccucuucug

SEQ ID NO: 13792 - RNA, 22 nt, Artificial Sequence
  SAMD9L targeting guide sequence portion
aaacccaauucuucuugucauc

SEQ ID NO: 13793 - RNA, 22 nt, Artificial Sequence
  SAMD9L targeting guide sequence portion
aaacuacuaaauauuccugcua

SEQ ID NO: 13794 - RNA, 22 nt, Artificial Sequence
  SAMD9L targeting guide sequence portion
aaacuccccugcuggacuauaa

SEQ ID NO: 13795 - RNA, 22 nt, Artificial Sequence
  SAMD9L targeting guide sequence portion
aaagaaauaggaucaggccuau

SEQ ID NO: 13796 - RNA, 22 nt, Artificial Sequence
  SAMD9L targeting guide sequence portion
aaagagggacauguucuggacc

SEQ ID NO: 13797 - RNA, 22 nt, Artificial Sequence
  SAMD9L targeting guide sequence portion
aaagauaauuaugguuagcagg

SEQ ID NO: 13798 - RNA, 22 nt, Artificial Sequence
  SAMD9L targeting guide sequence portion
aaagcugugucugcugcugacc

SEQ ID NO: 13799 - RNA, 22 nt, Artificial Sequence
  SAMD9L targeting guide sequence portion
aaaggaggaaaaacuacuaaau

SEQ ID NO: 13800 - RNA, 22 nt, Artificial Sequence
  SAMD9L targeting guide sequence portion
aaaggcuugauguagagaaaaa

SEQ ID NO: 13801 - RNA, 22 nt, Artificial Sequence
  SAMD9L targeting guide sequence portion
aaaguuauaaugaaaggaggaa

SEQ ID NO: 13802 - RNA, 22 nt, Artificial Sequence
  SAMD9L targeting guide sequence portion
aaauaggaucaggccuaugucc

SEQ ID NO: 13803 - RNA, 22 nt, Artificial Sequence
  SAMD9L targeting guide sequence portion
aaauauaggccagaagaacccu

SEQ ID NO: 13804 - RNA, 22 nt, Artificial Sequence
  SAMD9L targeting guide sequence portion
aaauauuccugcuaaccauaau

SEQ ID NO: 13805 - RNA, 22 nt, Artificial Sequence
  SAMD9L targeting guide sequence portion
aaaugggggcuaaggagaagga

SEQ ID NO: 13806 - RNA, 22 nt, Artificial Sequence
  SAMD9L targeting guide sequence portion
aaauguuauaguccagcagggg

SEQ ID NO: 13807 - RNA, 22 nt, Artificial Sequence
  SAMD9L targeting guide sequence portion
aacaacuuggggaguauagcca

SEQ ID NO: 13808 - RNA, 22 nt, Artificial Sequence
  SAMD9L targeting guide sequence portion
aacaggaucucccaaguggcua

SEQ ID NO: 13809 - RNA, 22 nt, Artificial Sequence
  SAMD9L targeting guide sequence portion
aacaguugccucccucuucugc

SEQ ID NO: 13810 - RNA, 22 nt, Artificial Sequence
  SAMD9L targeting guide sequence portion
aacaugucccucuuucugaaag

SEQ ID NO: 13811 - RNA, 22 nt, Artificial Sequence
  SAMD9L targeting guide sequence portion
aacauuuaguaagacauaacua

SEQ ID NO: 13812 - RNA, 22 nt, Artificial Sequence
  SAMD9L targeting guide sequence portion
aaccauaauuaucuuuagaguu

SEQ ID NO: 13813 - RNA, 22 nt, Artificial Sequence
  SAMD9L targeting guide sequence portion
aacccaauucuucuugucauca

SEQ ID NO: 13814 - RNA, 22 nt, Artificial Sequence
  SAMD9L targeting guide sequence portion
aacccugauagagcauagacuu

SEQ ID NO: 13815 - RNA, 22 nt, Artificial Sequence
  SAMD9L targeting guide sequence portion
aacgcucacaugguccagaaca

SEQ ID NO: 13816 - RNA, 22 nt, Artificial Sequence
  SAMD9L targeting guide sequence portion
aacuaaaggcuugauguagaga

SEQ ID NO: 13817 - RNA, 22 nt, Artificial Sequence
  SAMD9L targeting guide sequence portion
aacuacuaaauauuccugcuaa

SEQ ID NO: 13818 - RNA, 22 nt, Artificial Sequence
  SAMD9L targeting guide sequence portion
aacuccccugcuggacuauaac

SEQ ID NO: 13819 - RNA, 22 nt, Artificial Sequence
  SAMD9L targeting guide sequence portion
aacucuaaagauaauuaugguu

SEQ ID NO: 13820 - RNA, 22 nt, Artificial Sequence
  SAMD9L targeting guide sequence portion
aacuguuuggagcagggucagc

SEQ ID NO: 13821 - RNA, 22 nt, Artificial Sequence
  SAMD9L targeting guide sequence portion
aacuuagauauucuggacucca

SEQ ID NO: 13822 - RNA, 22 nt, Artificial Sequence
  SAMD9L targeting guide sequence portion
aacuuggggaguauagccacuu

SEQ ID NO: 13823 - RNA, 22 nt, Artificial Sequence
  SAMD9L targeting guide sequence portion
aacuuuuuucucuacaucaagc

SEQ ID NO: 13824 - RNA, 22 nt, Artificial Sequence
  SAMD9L targeting guide sequence portion
aagaaauaggaucaggccuaug

SEQ ID NO: 13825 - RNA, 22 nt, Artificial Sequence
  SAMD9L targeting guide sequence portion
aagaacccugauagagcauaga

SEQ ID NO: 13826 - RNA, 22 nt, Artificial Sequence
  SAMD9L targeting guide sequence portion
aagaagaauuggguuuggaguc

SEQ ID NO: 13827 - RNA, 22 nt, Artificial Sequence
  SAMD9L targeting guide sequence portion
aagaagucuaugcucuaucagg

SEQ ID NO: 13828 - RNA, 22 nt, Artificial Sequence
  SAMD9L targeting guide sequence portion
aagaauuggguuuggaguccag

SEQ ID NO: 13829 - RNA, 22 nt, Artificial Sequence
  SAMD9L targeting guide sequence portion
aagacauaacuaaaggcuugau

SEQ ID NO: 13830 - RNA, 22 nt, Artificial Sequence
  SAMD9L targeting guide sequence portion
aagagggacauguucuggacca

SEQ ID NO: 13831 - RNA, 22 nt, Artificial Sequence
  SAMD9L targeting guide sequence portion
aagagggaggcaacuguuugga

SEQ ID NO: 13832 - RNA, 22 nt, Artificial Sequence
  SAMD9L targeting guide sequence portion
aagauaauuaugguuagcagga

SEQ ID NO: 13833 - RNA, 22 nt, Artificial Sequence
  SAMD9L targeting guide sequence portion
aagauaccugguggugggguca

SEQ ID NO: 13834 - RNA, 22 nt, Artificial Sequence
  SAMD9L targeting guide sequence portion
aagccuuuaguuaugucuuacu

SEQ ID NO: 13835 - RNA, 22 nt, Artificial Sequence
  SAMD9L targeting guide sequence portion
aagcucucuaagauaccuggug

SEQ ID NO: 13836 - RNA, 22 nt, Artificial Sequence
  SAMD9L targeting guide sequence portion
aagcugugucugcugcugaccc

SEQ ID NO: 13837 - RNA, 22 nt, Artificial Sequence
  SAMD9L targeting guide sequence portion
aaggaagcucucuaagauaccu

SEQ ID NO: 13838 - RNA, 22 nt, Artificial Sequence
  SAMD9L targeting guide sequence portion
aaggagaaggaagcucucuaag

SEQ ID NO: 13839 - RNA, 22 nt, Artificial Sequence
  SAMD9L targeting guide sequence portion
aaggaggaaaaacuacuaaaua

SEQ ID NO: 13840 - RNA, 22 nt, Artificial Sequence
  SAMD9L targeting guide sequence portion
aaggcuugauguagagaaaaaa

SEQ ID NO: 13841 - RNA, 22 nt, Artificial Sequence
  SAMD9L targeting guide sequence portion
aagucuaugcucuaucaggguu

SEQ ID NO: 13842 - RNA, 22 nt, Artificial Sequence
  SAMD9L targeting guide sequence portion
aaguggcuauacuccccaaguu

SEQ ID NO: 13843 - RNA, 22 nt, Artificial Sequence
  SAMD9L targeting guide sequence portion
aaguuacauuacaaagagauac

SEQ ID NO: 13844 - RNA, 22 nt, Artificial Sequence
  SAMD9L targeting guide sequence portion
aaguuauaaugaaaggaggaaa

SEQ ID NO: 13845 - RNA, 22 nt, Artificial Sequence
  SAMD9L targeting guide sequence portion
aaguuguucauaggccugggga

SEQ ID NO: 13846 - RNA, 22 nt, Artificial Sequence
  SAMD9L targeting guide sequence portion
aauaauucugaccccaccacca

SEQ ID NO: 13847 - RNA, 22 nt, Artificial Sequence
  SAMD9L targeting guide sequence portion
aauaggaucaggccuauguccc

SEQ ID NO: 13848 - RNA, 22 nt, Artificial Sequence
  SAMD9L targeting guide sequence portion
aauauaggccagaagaacccug

SEQ ID NO: 13849 - RNA, 22 nt, Artificial Sequence
  SAMD9L targeting guide sequence portion
aauaucuaaguuacauuacaaa

SEQ ID NO: 13850 - RNA, 22 nt, Artificial Sequence
  SAMD9L targeting guide sequence portion
aauauuccugcuaaccauaauu

SEQ ID NO: 13851 - RNA, 22 nt, Artificial Sequence
  SAMD9L targeting guide sequence portion
aauauuuaguaguuuuuccucc

SEQ ID NO: 13852 - RNA, 22 nt, Artificial Sequence
  SAMD9L targeting guide sequence portion
aaucugggcaacgcucacaugg

SEQ ID NO: 13853 - RNA, 22 nt, Artificial Sequence
  SAMD9L targeting guide sequence portion
aaugaaaggaggaaaaacuacu

SEQ ID NO: 13854 - RNA, 22 nt, Artificial Sequence
  SAMD9L targeting guide sequence portion
aaugggggcuaaggagaaggaa

SEQ ID NO: 13855 - RNA, 22 nt, Artificial Sequence
  SAMD9L targeting guide sequence portion
aauguaacuuagauauucugga

SEQ ID NO: 13856 - RNA, 22 nt, Artificial Sequence
  SAMD9L targeting guide sequence portion
aauguuauaguccagcagggga

SEQ ID NO: 13857 - RNA, 22 nt, Artificial Sequence
  SAMD9L targeting guide sequence portion
aauuaucuuuagaguuaauaau

SEQ ID NO: 13858 - RNA, 22 nt, Artificial Sequence
  SAMD9L targeting guide sequence portion
aauuaugguuagcaggaauauu

SEQ ID NO: 13859 - RNA, 22 nt, Artificial Sequence
  SAMD9L targeting guide sequence portion
aauuauuaacucuaaagauaau

SEQ ID NO: 13860 - RNA, 22 nt, Artificial Sequence
  SAMD9L targeting guide sequence portion
aauucugaccccaccaccaggu

SEQ ID NO: 13861 - RNA, 22 nt, Artificial Sequence
  SAMD9L targeting guide sequence portion
aauucuucuugucaucaagaag

SEQ ID NO: 13862 - RNA, 22 nt, Artificial Sequence
  SAMD9L targeting guide sequence portion
aauuggguuuggaguccagaau

SEQ ID NO: 13863 - RNA, 22 nt, Artificial Sequence
  SAMD9L targeting guide sequence portion
acaacuuggggaguauagccac

SEQ ID NO: 13864 - RNA, 22 nt, Artificial Sequence
  SAMD9L targeting guide sequence portion
acaagaagaauuggguuuggag

SEQ ID NO: 13865 - RNA, 22 nt, Artificial Sequence
  SAMD9L targeting guide sequence portion
acacagcuuucagaaagaggga

SEQ ID NO: 13866 - RNA, 22 nt, Artificial Sequence
  SAMD9L targeting guide sequence portion
acagcuuucagaaagagggaca

SEQ ID NO: 13867 - RNA, 22 nt, Artificial Sequence
  SAMD9L targeting guide sequence portion
acaggaucucccaaguggcuau

SEQ ID NO: 13868 - RNA, 22 nt, Artificial Sequence
  SAMD9L targeting guide sequence portion
acaguaacaggaucucccaagu

SEQ ID NO: 13869 - RNA, 22 nt, Artificial Sequence
  SAMD9L targeting guide sequence portion
acaguugccucccucuucugca

SEQ ID NO: 13870 - RNA, 22 nt, Artificial Sequence
  SAMD9L targeting guide sequence portion
acauaacuaaaggcuugaugua

SEQ ID NO: 13871 - RNA, 22 nt, Artificial Sequence
  SAMD9L targeting guide sequence portion
acauaggccugauccuauuucu

SEQ ID NO: 13872 - RNA, 22 nt, Artificial Sequence
  SAMD9L targeting guide sequence portion
acaucaagccuuuaguuauguc

SEQ ID NO: 13873 - RNA, 22 nt, Artificial Sequence
  SAMD9L targeting guide sequence portion
acaucuuuguaucucuuuguaa

SEQ ID NO: 13874 - RNA, 22 nt, Artificial Sequence
  SAMD9L targeting guide sequence portion
acaugguccagaacaugucccu

SEQ ID NO: 13875 - RNA, 22 nt, Artificial Sequence
  SAMD9L targeting guide sequence portion
acaugucccucuuucugaaagc

SEQ ID NO: 13876 - RNA, 22 nt, Artificial Sequence
  SAMD9L targeting guide sequence portion
acauguucuggaccaugugagc

SEQ ID NO: 13877 - RNA, 22 nt, Artificial Sequence
  SAMD9L targeting guide sequence portion
acauuuaguaagacauaacuaa

SEQ ID NO: 13878 - RNA, 22 nt, Artificial Sequence
  SAMD9L targeting guide sequence portion
accaccagguaucuuagagagc

SEQ ID NO: 13879 - RNA, 22 nt, Artificial Sequence
  SAMD9L targeting guide sequence portion
accagguaucuuagagagcuuc

SEQ ID NO: 13880 - RNA, 22 nt, Artificial Sequence
  SAMD9L targeting guide sequence portion
accaguccauacaguaacagga

SEQ ID NO: 13881 - RNA, 22 nt, Artificial Sequence
  SAMD9L targeting guide sequence portion
accauaauuaucuuuagaguua

SEQ ID NO: 13882 - RNA, 22 nt, Artificial Sequence
  SAMD9L targeting guide sequence portion
accaugugagcguugcccagau

SEQ ID NO: 13883 - RNA, 22 nt, Artificial Sequence
  SAMD9L targeting guide sequence portion
acccaauucuucuugucaucaa

SEQ ID NO: 13884 - RNA, 22 nt, Artificial Sequence
  SAMD9L targeting guide sequence portion
accccaccaccagguaucuuag

SEQ ID NO: 13885 - RNA, 22 nt, Artificial Sequence
  SAMD9L targeting guide sequence portion
acccugauagagcauagacuuc

SEQ ID NO: 13886 - RNA, 22 nt, Artificial Sequence
  SAMD9L targeting guide sequence portion
acccugcuccaaacaguugccu

SEQ ID NO: 13887 - RNA, 22 nt, Artificial Sequence
  SAMD9L targeting guide sequence portion
accuggugguggggucagaauu

SEQ ID NO: 13888 - RNA, 22 nt, Artificial Sequence
  SAMD9L targeting guide sequence portion
acgcucacaugguccagaacau

SEQ ID NO: 13889 - RNA, 22 nt, Artificial Sequence
  SAMD9L targeting guide sequence portion
acuaaaggcuugauguagagaa

SEQ ID NO: 13890 - RNA, 22 nt, Artificial Sequence
  SAMD9L targeting guide sequence portion
acuaaauauuccugcuaaccau

SEQ ID NO: 13891 - RNA, 22 nt, Artificial Sequence
  SAMD9L targeting guide sequence portion
acuaaauguuauaguccagcag

SEQ ID NO: 13892 - RNA, 22 nt, Artificial Sequence
  SAMD9L targeting guide sequence portion
acuacuaaauauuccugcuaac

SEQ ID NO: 13893 - RNA, 22 nt, Artificial Sequence
  SAMD9L targeting guide sequence portion
acuauaacauuuaguaagacau

SEQ ID NO: 13894 - RNA, 22 nt, Artificial Sequence
  SAMD9L targeting guide sequence portion
acuccaaacccaauucuucuug

SEQ ID NO: 13895 - RNA, 22 nt, Artificial Sequence
  SAMD9L targeting guide sequence portion
acuccccaaguuguucauaggc

SEQ ID NO: 13896 - RNA, 22 nt, Artificial Sequence
  SAMD9L targeting guide sequence portion
acuccccugcuggacuauaaca

SEQ ID NO: 13897 - RNA, 22 nt, Artificial Sequence
  SAMD9L targeting guide sequence portion
acucuaaagauaauuaugguua

SEQ ID NO: 13898 - RNA, 22 nt, Artificial Sequence
  SAMD9L targeting guide sequence portion
acugcagaagagggaggcaacu

SEQ ID NO: 13899 - RNA, 22 nt, Artificial Sequence
  SAMD9L targeting guide sequence portion
acugguggacugcagaagaggg

SEQ ID NO: 13900 - RNA, 22 nt, Artificial Sequence
  SAMD9L targeting guide sequence portion
acuguauggacugguggacugc

SEQ ID NO: 13901 - RNA, 22 nt, Artificial Sequence
  SAMD9L targeting guide sequence portion
acuguuuggagcagggucagca

SEQ ID NO: 13902 - RNA, 22 nt, Artificial Sequence
  SAMD9L targeting guide sequence portion
acuuagauauucuggacuccaa

SEQ ID NO: 13903 - RNA, 22 nt, Artificial Sequence
  SAMD9L targeting guide sequence portion
acuucuugaugacaagaagaau

SEQ ID NO: 13904 - RNA, 22 nt, Artificial Sequence
  SAMD9L targeting guide sequence portion
acuugggagauccuguuacugu

SEQ ID NO: 13905 - RNA, 22 nt, Artificial Sequence
  SAMD9L targeting guide sequence portion
acuuggggaguauagccacuug

SEQ ID NO: 13906 - RNA, 22 nt, Artificial Sequence
  SAMD9L targeting guide sequence portion
acuuuuuucucuacaucaagcc

SEQ ID NO: 13907 - RNA, 22 nt, Artificial Sequence
  SAMD9L targeting guide sequence portion
agaaaaaaguuauaaugaaagg

SEQ ID NO: 13908 - RNA, 22 nt, Artificial Sequence
  SAMD9L targeting guide sequence portion
agaaagagggacauguucugga

SEQ ID NO: 13909 - RNA, 22 nt, Artificial Sequence
  SAMD9L targeting guide sequence portion
agaaauaggaucaggccuaugu

SEQ ID NO: 13910 - RNA, 22 nt, Artificial Sequence
  SAMD9L targeting guide sequence portion
agaaauauaggccagaagaacc

SEQ ID NO: 13911 - RNA, 22 nt, Artificial Sequence
  SAMD9L targeting guide sequence portion
agaacaugucccucuuucugaa

SEQ ID NO: 13912 - RNA, 22 nt, Artificial Sequence
  SAMD9L targeting guide sequence portion
agaacccugauagagcauagac

SEQ ID NO: 13913 - RNA, 22 nt, Artificial Sequence
  SAMD9L targeting guide sequence portion
agaagaacccugauagagcaua

SEQ ID NO: 13914 - RNA, 22 nt, Artificial Sequence
  SAMD9L targeting guide sequence portion
agaagaauuggguuuggagucc

SEQ ID NO: 13915 - RNA, 22 nt, Artificial Sequence
  SAMD9L targeting guide sequence portion
agaagagggaggcaacuguuug

SEQ ID NO: 13916 - RNA, 22 nt, Artificial Sequence
  SAMD9L targeting guide sequence portion
agaaggaagcucucuaagauac

SEQ ID NO: 13917 - RNA, 22 nt, Artificial Sequence
  SAMD9L targeting guide sequence portion
agaagucuaugcucuaucaggg

SEQ ID NO: 13918 - RNA, 22 nt, Artificial Sequence
  SAMD9L targeting guide sequence portion
agaauaucuaaguuacauuaca

SEQ ID NO: 13919 - RNA, 22 nt, Artificial Sequence
  SAMD9L targeting guide sequence portion
agaauuauuaacucuaaagaua

SEQ ID NO: 13920 - RNA, 22 nt, Artificial Sequence
  SAMD9L targeting guide sequence portion
agaauuggguuuggaguccaga

SEQ ID NO: 13921 - RNA, 22 nt, Artificial Sequence
  SAMD9L targeting guide sequence portion
agacacagcuuucagaaagagg

SEQ ID NO: 13922 - RNA, 22 nt, Artificial Sequence
  SAMD9L targeting guide sequence portion
agacauaacuaaaggcuugaug

SEQ ID NO: 13923 - RNA, 22 nt, Artificial Sequence
  SAMD9L targeting guide sequence portion
agacuucuugaugacaagaaga

SEQ ID NO: 13924 - RNA, 22 nt, Artificial Sequence
  SAMD9L targeting guide sequence portion
agagaaaaaaguuauaaugaaa

SEQ ID NO: 13925 - RNA, 22 nt, Artificial Sequence
  SAMD9L targeting guide sequence portion
agagagcuuccuucuccuuagc

SEQ ID NO: 13926 - RNA, 22 nt, Artificial Sequence
  SAMD9L targeting guide sequence portion
agagcauagacuucuugaugac

SEQ ID NO: 13927 - RNA, 22 nt, Artificial Sequence
  SAMD9L targeting guide sequence portion
agagcuuccuucuccuuagccc

SEQ ID NO: 13928 - RNA, 22 nt, Artificial Sequence
  SAMD9L targeting guide sequence portion
agagggacauguucuggaccau

SEQ ID NO: 13929 - RNA, 22 nt, Artificial Sequence
  SAMD9L targeting guide sequence portion
agagggaggcaacuguuuggag

SEQ ID NO: 13930 - RNA, 22 nt, Artificial Sequence
  SAMD9L targeting guide sequence portion
agaguuaauaauucugacccca

SEQ ID NO: 13931 - RNA, 22 nt, Artificial Sequence
  SAMD9L targeting guide sequence portion
agauaauuaugguuagcaggaa

SEQ ID NO: 13932 - RNA, 22 nt, Artificial Sequence
  SAMD9L targeting guide sequence portion
agauaccuggugguggggucag

SEQ ID NO: 13933 - RNA, 22 nt, Artificial Sequence
  SAMD9L targeting guide sequence portion
agauauucuggacuccaaaccc

SEQ ID NO: 13934 - RNA, 22 nt, Artificial Sequence
  SAMD9L targeting guide sequence portion
agauccuguuacuguauggacu

SEQ ID NO: 13935 - RNA, 22 nt, Artificial Sequence
  SAMD9L targeting guide sequence portion
agauucauagaaauauaggcca

SEQ ID NO: 13936 - RNA, 22 nt, Artificial Sequence
  SAMD9L targeting guide sequence portion
agcagacacagcuuucagaaag

SEQ ID NO: 13937 - RNA, 22 nt, Artificial Sequence
  SAMD9L targeting guide sequence portion
agcagcagacacagcuuucaga

SEQ ID NO: 13938 - RNA, 22 nt, Artificial Sequence
  SAMD9L targeting guide sequence portion
agcaggaauauuuaguaguuuu

SEQ ID NO: 13939 - RNA, 22 nt, Artificial Sequence
  SAMD9L targeting guide sequence portion
agcaggggaguuuaaaagaaau

SEQ ID NO: 13940 - RNA, 22 nt, Artificial Sequence
  SAMD9L targeting guide sequence portion
agcagggucagcagcagacaca

SEQ ID NO: 13941 - RNA, 22 nt, Artificial Sequence
  SAMD9L targeting guide sequence portion
agcauagacuucuugaugacaa

SEQ ID NO: 13942 - RNA, 22 nt, Artificial Sequence
  SAMD9L targeting guide sequence portion
agccacuugggagauccuguua

SEQ ID NO: 13943 - RNA, 22 nt, Artificial Sequence
  SAMD9L targeting guide sequence portion
agccuuuaguuaugucuuacua

SEQ ID NO: 13944 - RNA, 22 nt, Artificial Sequence
  SAMD9L targeting guide sequence portion
agcguugcccagauucauagaa

SEQ ID NO: 13945 - RNA, 22 nt, Artificial Sequence
  SAMD9L targeting guide sequence portion
agcucucuaagauaccuggugg

SEQ ID NO: 13946 - RNA, 22 nt, Artificial Sequence
  SAMD9L targeting guide sequence portion
agcugugucugcugcugacccu

SEQ ID NO: 13947 - RNA, 22 nt, Artificial Sequence
  SAMD9L targeting guide sequence portion
agcuuccuucuccuuagccccc

SEQ ID NO: 13948 - RNA, 22 nt, Artificial Sequence
  SAMD9L targeting guide sequence portion
agcuuucagaaagagggacaug

SEQ ID NO: 13949 - RNA, 22 nt, Artificial Sequence
  SAMD9L targeting guide sequence portion
aggaaaaacuacuaaauauucc

SEQ ID NO: 13950 - RNA, 22 nt, Artificial Sequence
  SAMD9L targeting guide sequence portion
aggaagcucucuaagauaccug

SEQ ID NO: 13951 - RNA, 22 nt, Artificial Sequence
  SAMD9L targeting guide sequence portion
aggaauauuuaguaguuuuucc

SEQ ID NO: 13952 - RNA, 22 nt, Artificial Sequence
  SAMD9L targeting guide sequence portion
aggagaaggaagcucucuaaga

SEQ ID NO: 13953 - RNA, 22 nt, Artificial Sequence
  SAMD9L targeting guide sequence portion
aggaggaaaaacuacuaaauau

SEQ ID NO: 13954 - RNA, 22 nt, Artificial Sequence
  SAMD9L targeting guide sequence portion
aggaucaggccuauguccccag

SEQ ID NO: 13955 - RNA, 22 nt, Artificial Sequence
  SAMD9L targeting guide sequence portion
aggaucucccaaguggcuauac

SEQ ID NO: 13956 - RNA, 22 nt, Artificial Sequence
  SAMD9L targeting guide sequence portion
aggcaacuguuuggagcagggu

SEQ ID NO: 13957 - RNA, 22 nt, Artificial Sequence
  SAMD9L targeting guide sequence portion
aggccagaagaacccugauaga

SEQ ID NO: 13958 - RNA, 22 nt, Artificial Sequence
  SAMD9L targeting guide sequence portion
aggccuaugaacaacuugggga

SEQ ID NO: 13959 - RNA, 22 nt, Artificial Sequence
  SAMD9L targeting guide sequence portion
aggccuauguccccaggccuau

SEQ ID NO: 13960 - RNA, 22 nt, Artificial Sequence
  SAMD9L targeting guide sequence portion
aggccugauccuauuucuuuua

SEQ ID NO: 13961 - RNA, 22 nt, Artificial Sequence
  SAMD9L targeting guide sequence portion
aggccuggggacauaggccuga

SEQ ID NO: 13962 - RNA, 22 nt, Artificial Sequence
  SAMD9L targeting guide sequence portion
aggcuugauguagagaaaaaag

SEQ ID NO: 13963 - RNA, 22 nt, Artificial Sequence
  SAMD9L targeting guide sequence portion
agggacauguucuggaccaugu

SEQ ID NO: 13964 - RNA, 22 nt, Artificial Sequence
  SAMD9L targeting guide sequence portion
agggaggcaacuguuuggagca

SEQ ID NO: 13965 - RNA, 22 nt, Artificial Sequence
  SAMD9L targeting guide sequence portion
aggggaguuuaaaagaaauagg

SEQ ID NO: 13966 - RNA, 22 nt, Artificial Sequence
  SAMD9L targeting guide sequence portion
agggucagcagcagacacagcu

SEQ ID NO: 13967 - RNA, 22 nt, Artificial Sequence
  SAMD9L targeting guide sequence portion
aggguucuucuggccuauauuu

SEQ ID NO: 13968 - RNA, 22 nt, Artificial Sequence
  SAMD9L targeting guide sequence portion
agguaucuuagagagcuuccuu

SEQ ID NO: 13969 - RNA, 22 nt, Artificial Sequence
  SAMD9L targeting guide sequence portion
aguaacaggaucucccaagugg

SEQ ID NO: 13970 - RNA, 22 nt, Artificial Sequence
  SAMD9L targeting guide sequence portion
aguaagacauaacuaaaggcuu

SEQ ID NO: 13971 - RNA, 22 nt, Artificial Sequence
  SAMD9L targeting guide sequence portion
aguaguuuuuccuccuuucauu

SEQ ID NO: 13972 - RNA, 22 nt, Artificial Sequence
  SAMD9L targeting guide sequence portion
aguauagccacuugggagaucc

SEQ ID NO: 13973 - RNA, 22 nt, Artificial Sequence
  SAMD9L targeting guide sequence portion
aguccaccaguccauacaguaa

SEQ ID NO: 13974 - RNA, 22 nt, Artificial Sequence
  SAMD9L targeting guide sequence portion
aguccagaauaucuaaguuaca

SEQ ID NO: 13975 - RNA, 22 nt, Artificial Sequence
  SAMD9L targeting guide sequence portion
aguccagcaggggaguuuaaaa

SEQ ID NO: 13976 - RNA, 22 nt, Artificial Sequence
  SAMD9L targeting guide sequence portion
aguccauacaguaacaggaucu

SEQ ID NO: 13977 - RNA, 22 nt, Artificial Sequence
  SAMD9L targeting guide sequence portion
agucuaugcucuaucaggguuc

SEQ ID NO: 13978 - RNA, 22 nt, Artificial Sequence
  SAMD9L targeting guide sequence portion
aguggcuauacuccccaaguug

SEQ ID NO: 13979 - RNA, 22 nt, Artificial Sequence
  SAMD9L targeting guide sequence portion
aguuaauaauucugaccccacc

SEQ ID NO: 13980 - RNA, 22 nt, Artificial Sequence
  SAMD9L targeting guide sequence portion
aguuacauuacaaagagauaca

SEQ ID NO: 13981 - RNA, 22 nt, Artificial Sequence
  SAMD9L targeting guide sequence portion
aguuauaaugaaaggaggaaaa

SEQ ID NO: 13982 - RNA, 22 nt, Artificial Sequence
  SAMD9L targeting guide sequence portion
aguuaugucuuacuaaauguua

SEQ ID NO: 13983 - RNA, 22 nt, Artificial Sequence
  SAMD9L targeting guide sequence portion
aguugccucccucuucugcagu

SEQ ID NO: 13984 - RNA, 22 nt, Artificial Sequence
  SAMD9L targeting guide sequence portion
aguuguucauaggccuggggac

SEQ ID NO: 13985 - RNA, 22 nt, Artificial Sequence
  SAMD9L targeting guide sequence portion
aguuuaaaagaaauaggaucag

SEQ ID NO: 13986 - RNA, 22 nt, Artificial Sequence
  SAMD9L targeting guide sequence portion
aguuuuuccuccuuucauuaua

SEQ ID NO: 13987 - RNA, 22 nt, Artificial Sequence
  SAMD9L targeting guide sequence portion
auaacauuuaguaagacauaac

SEQ ID NO: 13988 - RNA, 22 nt, Artificial Sequence
  SAMD9L targeting guide sequence portion
auaacuaaaggcuugauguaga

SEQ ID NO: 13989 - RNA, 22 nt, Artificial Sequence
  SAMD9L targeting guide sequence portion
auaacuuuuuucucuacaucaa

SEQ ID NO: 13990 - RNA, 22 nt, Artificial Sequence
  SAMD9L targeting guide sequence portion
auaaugaaaggaggaaaaacua

SEQ ID NO: 13991 - RNA, 22 nt, Artificial Sequence
  SAMD9L targeting guide sequence portion
auaauuaucuuuagaguuaaua

SEQ ID NO: 13992 - RNA, 22 nt, Artificial Sequence
  SAMD9L targeting guide sequence portion
auaauuaugguuagcaggaaua

SEQ ID NO: 13993 - RNA, 22 nt, Artificial Sequence
  SAMD9L targeting guide sequence portion
auaauucugaccccaccaccag

SEQ ID NO: 13994 - RNA, 22 nt, Artificial Sequence
  SAMD9L targeting guide sequence portion
auacaguaacaggaucucccaa

SEQ ID NO: 13995 - RNA, 22 nt, Artificial Sequence
  SAMD9L targeting guide sequence portion
auaccuggugguggggucagaa

SEQ ID NO: 13996 - RNA, 22 nt, Artificial Sequence
  SAMD9L targeting guide sequence portion
auacuccccaaguuguucauag

SEQ ID NO: 13997 - RNA, 22 nt, Artificial Sequence
  SAMD9L targeting guide sequence portion
auagaaauauaggccagaagaa

SEQ ID NO: 13998 - RNA, 22 nt, Artificial Sequence
  SAMD9L targeting guide sequence portion
auagacuucuugaugacaagaa

SEQ ID NO: 13999 - RNA, 22 nt, Artificial Sequence
  SAMD9L targeting guide sequence portion
auagagcauagacuucuugaug

SEQ ID NO: 14000 - RNA, 22 nt, Artificial Sequence
  SAMD9L targeting guide sequence portion
auagccacuugggagauccugu

SEQ ID NO: 14001 - RNA, 22 nt, Artificial Sequence
  SAMD9L targeting guide sequence portion
auaggaucaggccuaugucccc

SEQ ID NO: 14002 - RNA, 22 nt, Artificial Sequence
  SAMD9L targeting guide sequence portion
auaggccagaagaacccugaua

SEQ ID NO: 14003 - RNA, 22 nt, Artificial Sequence
  SAMD9L targeting guide sequence portion
auaggccugauccuauuucuuu

SEQ ID NO: 14004 - RNA, 22 nt, Artificial Sequence
  SAMD9L targeting guide sequence portion
auaggccuggggacauaggccu

SEQ ID NO: 14005 - RNA, 22 nt, Artificial Sequence
  SAMD9L targeting guide sequence portion
auaguccagcaggggaguuuaa

SEQ ID NO: 14006 - RNA, 22 nt, Artificial Sequence
  SAMD9L targeting guide sequence portion
auauaggccagaagaacccuga

SEQ ID NO: 14007 - RNA, 22 nt, Artificial Sequence
  SAMD9L targeting guide sequence portion
auaucuaaguuacauuacaaag

SEQ ID NO: 14008 - RNA, 22 nt, Artificial Sequence
  SAMD9L targeting guide sequence portion
auauuccugcuaaccauaauua

SEQ ID NO: 14009 - RNA, 22 nt, Artificial Sequence
  SAMD9L targeting guide sequence portion
auauucuggacuccaaacccaa

SEQ ID NO: 14010 - RNA, 22 nt, Artificial Sequence
  SAMD9L targeting guide sequence portion
auauuuaguaguuuuuccuccu

SEQ ID NO: 14011 - RNA, 22 nt, Artificial Sequence
  SAMD9L targeting guide sequence portion
auauuucuaugaaucugggcaa

SEQ ID NO: 14012 - RNA, 22 nt, Artificial Sequence
  SAMD9L targeting guide sequence portion
aucaagaagucuaugcucuauc

SEQ ID NO: 14013 - RNA, 22 nt, Artificial Sequence
  SAMD9L targeting guide sequence portion
aucaagccuuuaguuaugucuu

SEQ ID NO: 14014 - RNA, 22 nt, Artificial Sequence
  SAMD9L targeting guide sequence portion
aucaggccuauguccccaggcc

SEQ ID NO: 14015 - RNA, 22 nt, Artificial Sequence
  SAMD9L targeting guide sequence portion
aucaggguucuucuggccuaua

SEQ ID NO: 14016 - RNA, 22 nt, Artificial Sequence
  SAMD9L targeting guide sequence portion
auccuauuucuuuuaaacuccc

SEQ ID NO: 14017 - RNA, 22 nt, Artificial Sequence
  SAMD9L targeting guide sequence portion
auccuguuacuguauggacugg

SEQ ID NO: 14018 - RNA, 22 nt, Artificial Sequence
  SAMD9L targeting guide sequence portion
aucuaaguuacauuacaaagag

SEQ ID NO: 14019 - RNA, 22 nt, Artificial Sequence
  SAMD9L targeting guide sequence portion
aucucccaaguggcuauacucc

SEQ ID NO: 14020 - RNA, 22 nt, Artificial Sequence
  SAMD9L targeting guide sequence portion
aucucuuuguaauguaacuuag

SEQ ID NO: 14021 - RNA, 22 nt, Artificial Sequence
  SAMD9L targeting guide sequence portion
aucugggcaacgcucacauggu

SEQ ID NO: 14022 - RNA, 22 nt, Artificial Sequence
  SAMD9L targeting guide sequence portion
aucuuagagagcuuccuucucc

SEQ ID NO: 14023 - RNA, 22 nt, Artificial Sequence
  SAMD9L targeting guide sequence portion
aucuuuagaguuaauaauucug

SEQ ID NO: 14024 - RNA, 22 nt, Artificial Sequence
  SAMD9L targeting guide sequence portion
aucuuuguaucucuuuguaaug

SEQ ID NO: 14025 - RNA, 22 nt, Artificial Sequence
  SAMD9L targeting guide sequence portion
augaaaggaggaaaaacuacua

SEQ ID NO: 14026 - RNA, 22 nt, Artificial Sequence
  SAMD9L targeting guide sequence portion
augaacaacuuggggaguauag

SEQ ID NO: 14027 - RNA, 22 nt, Artificial Sequence
  SAMD9L targeting guide sequence portion
augaaucugggcaacgcucaca

SEQ ID NO: 14028 - RNA, 22 nt, Artificial Sequence
  SAMD9L targeting guide sequence portion
augacaagaagaauuggguuug

SEQ ID NO: 14029 - RNA, 22 nt, Artificial Sequence
  SAMD9L targeting guide sequence portion
augcucuaucaggguucuucug

SEQ ID NO: 14030 - RNA, 22 nt, Artificial Sequence
  SAMD9L targeting guide sequence portion
auggacugguggacugcagaag

SEQ ID NO: 14031 - RNA, 22 nt, Artificial Sequence
  SAMD9L targeting guide sequence portion
augggggcuaaggagaaggaag

SEQ ID NO: 14032 - RNA, 22 nt, Artificial Sequence
  SAMD9L targeting guide sequence portion
augguccagaacaugucccucu

SEQ ID NO: 14033 - RNA, 22 nt, Artificial Sequence
  SAMD9L targeting guide sequence portion
augguuagcaggaauauuuagu

SEQ ID NO: 14034 - RNA, 22 nt, Artificial Sequence
  SAMD9L targeting guide sequence portion
auguaacuuagauauucuggac

SEQ ID NO: 14035 - RNA, 22 nt, Artificial Sequence
  SAMD9L targeting guide sequence portion
auguagagaaaaaaguuauaau

SEQ ID NO: 14036 - RNA, 22 nt, Artificial Sequence
  SAMD9L targeting guide sequence portion
auguccccaggccuaugaacaa

SEQ ID NO: 14037 - RNA, 22 nt, Artificial Sequence
  SAMD9L targeting guide sequence portion
augucccucuuucugaaagcug

SEQ ID NO: 14038 - RNA, 22 nt, Artificial Sequence
  SAMD9L targeting guide sequence portion
augucuuacuaaauguuauagu

SEQ ID NO: 14039 - RNA, 22 nt, Artificial Sequence
  SAMD9L targeting guide sequence portion
augugagcguugcccagauuca

SEQ ID NO: 14040 - RNA, 22 nt, Artificial Sequence
  SAMD9L targeting guide sequence portion
auguuauaguccagcaggggag

SEQ ID NO: 14041 - RNA, 22 nt, Artificial Sequence
  SAMD9L targeting guide sequence portion
auguucuggaccaugugagcgu

SEQ ID NO: 14042 - RNA, 22 nt, Artificial Sequence
  SAMD9L targeting guide sequence portion
auuaacucuaaagauaauuaug

SEQ ID NO: 14043 - RNA, 22 nt, Artificial Sequence
  SAMD9L targeting guide sequence portion
auuauaacuuuuuucucuacau

SEQ ID NO: 14044 - RNA, 22 nt, Artificial Sequence
  SAMD9L targeting guide sequence portion
auuaucuuuagaguuaauaauu

SEQ ID NO: 14045 - RNA, 22 nt, Artificial Sequence
  SAMD9L targeting guide sequence portion
auuaugguuagcaggaauauuu

SEQ ID NO: 14046 - RNA, 22 nt, Artificial Sequence
  SAMD9L targeting guide sequence portion
auuauuaacucuaaagauaauu

SEQ ID NO: 14047 - RNA, 22 nt, Artificial Sequence
  SAMD9L targeting guide sequence portion
auucauagaaauauaggccaga

SEQ ID NO: 14048 - RNA, 22 nt, Artificial Sequence
  SAMD9L targeting guide sequence portion
auuccugcuaaccauaauuauc

SEQ ID NO: 14049 - RNA, 22 nt, Artificial Sequence
  SAMD9L targeting guide sequence portion
auucugaccccaccaccaggua

SEQ ID NO: 14050 - RNA, 22 nt, Artificial Sequence
  SAMD9L targeting guide sequence portion
auucuggacuccaaacccaauu

SEQ ID NO: 14051 - RNA, 22 nt, Artificial Sequence
  SAMD9L targeting guide sequence portion
auucuucuugucaucaagaagu

SEQ ID NO: 14052 - RNA, 22 nt, Artificial Sequence
  SAMD9L targeting guide sequence portion
auuggguuuggaguccagaaua

SEQ ID NO: 14053 - RNA, 22 nt, Artificial Sequence
  SAMD9L targeting guide sequence portion
auuuaguaagacauaacuaaag

SEQ ID NO: 14054 - RNA, 22 nt, Artificial Sequence
  SAMD9L targeting guide sequence portion
auuuaguaguuuuuccuccuuu

SEQ ID NO: 14055 - RNA, 22 nt, Artificial Sequence
  SAMD9L targeting guide sequence portion
auuucuaugaaucugggcaacg

SEQ ID NO: 14056 - RNA, 22 nt, Artificial Sequence
  SAMD9L targeting guide sequence portion
auuucuuuuaaacuccccugcu

SEQ ID NO: 14057 - RNA, 22 nt, Artificial Sequence
  SAMD9L targeting guide sequence portion
caaacaguugccucccucuucu

SEQ ID NO: 14058 - RNA, 22 nt, Artificial Sequence
  SAMD9L targeting guide sequence portion
caaacccaauucuucuugucau

SEQ ID NO: 14059 - RNA, 22 nt, Artificial Sequence
  SAMD9L targeting guide sequence portion
caacgcucacaugguccagaac

SEQ ID NO: 14060 - RNA, 22 nt, Artificial Sequence
  SAMD9L targeting guide sequence portion
caacuguuuggagcagggucag

SEQ ID NO: 14061 - RNA, 22 nt, Artificial Sequence
  SAMD9L targeting guide sequence portion
caacuuggggaguauagccacu

SEQ ID NO: 14062 - RNA, 22 nt, Artificial Sequence
  SAMD9L targeting guide sequence portion
caagaagaauuggguuuggagu

SEQ ID NO: 14063 - RNA, 22 nt, Artificial Sequence
  SAMD9L targeting guide sequence portion
caagaagucuaugcucuaucag

SEQ ID NO: 14064 - RNA, 22 nt, Artificial Sequence
  SAMD9L targeting guide sequence portion
caagccuuuaguuaugucuuac

SEQ ID NO: 14065 - RNA, 22 nt, Artificial Sequence
  SAMD9L targeting guide sequence portion
caaguggcuauacuccccaagu

SEQ ID NO: 14066 - RNA, 22 nt, Artificial Sequence
  SAMD9L targeting guide sequence portion
caaguuguucauaggccugggg

SEQ ID NO: 14067 - RNA, 22 nt, Artificial Sequence
  SAMD9L targeting guide sequence portion
caauucuucuugucaucaagaa

SEQ ID NO: 14068 - RNA, 22 nt, Artificial Sequence
  SAMD9L targeting guide sequence portion
cacagcuuucagaaagagggac

SEQ ID NO: 14069 - RNA, 22 nt, Artificial Sequence
  SAMD9L targeting guide sequence portion
cacaugguccagaacauguccc

SEQ ID NO: 14070 - RNA, 22 nt, Artificial Sequence
  SAMD9L targeting guide sequence portion
caccaccagguaucuuagagag

SEQ ID NO: 14071 - RNA, 22 nt, Artificial Sequence
  SAMD9L targeting guide sequence portion
caccagguaucuuagagagcuu

SEQ ID NO: 14072 - RNA, 22 nt, Artificial Sequence
  SAMD9L targeting guide sequence portion
caccaguccauacaguaacagg

SEQ ID NO: 14073 - RNA, 22 nt, Artificial Sequence
  SAMD9L targeting guide sequence portion
cacuugggagauccuguuacug

SEQ ID NO: 14074 - RNA, 22 nt, Artificial Sequence
  SAMD9L targeting guide sequence portion
cagaaagagggacauguucugg

SEQ ID NO: 14075 - RNA, 22 nt, Artificial Sequence
  SAMD9L targeting guide sequence portion
cagaacaugucccucuuucuga

SEQ ID NO: 14076 - RNA, 22 nt, Artificial Sequence
  SAMD9L targeting guide sequence portion
cagaagaacccugauagagcau

SEQ ID NO: 14077 - RNA, 22 nt, Artificial Sequence
  SAMD9L targeting guide sequence portion
cagaagagggaggcaacuguuu

SEQ ID NO: 14078 - RNA, 22 nt, Artificial Sequence
  SAMD9L targeting guide sequence portion
cagaauaucuaaguuacauuac

SEQ ID NO: 14079 - RNA, 22 nt, Artificial Sequence
  SAMD9L targeting guide sequence portion
cagaauuauuaacucuaaagau

SEQ ID NO: 14080 - RNA, 22 nt, Artificial Sequence
  SAMD9L targeting guide sequence portion
cagacacagcuuucagaaagag

SEQ ID NO: 14081 - RNA, 22 nt, Artificial Sequence
  SAMD9L targeting guide sequence portion
cagauucauagaaauauaggcc

SEQ ID NO: 14082 - RNA, 22 nt, Artificial Sequence
  SAMD9L targeting guide sequence portion
cagcagacacagcuuucagaaa

SEQ ID NO: 14083 - RNA, 22 nt, Artificial Sequence
  SAMD9L targeting guide sequence portion
cagcagcagacacagcuuucag

SEQ ID NO: 14084 - RNA, 22 nt, Artificial Sequence
  SAMD9L targeting guide sequence portion
cagcaggggaguuuaaaagaaa

SEQ ID NO: 14085 - RNA, 22 nt, Artificial Sequence
  SAMD9L targeting guide sequence portion
cagcuuucagaaagagggacau

SEQ ID NO: 14086 - RNA, 22 nt, Artificial Sequence
  SAMD9L targeting guide sequence portion
caggaauauuuaguaguuuuuc

SEQ ID NO: 14087 - RNA, 22 nt, Artificial Sequence
  SAMD9L targeting guide sequence portion
caggaucucccaaguggcuaua

SEQ ID NO: 14088 - RNA, 22 nt, Artificial Sequence
  SAMD9L targeting guide sequence portion
caggccuaugaacaacuugggg

SEQ ID NO: 14089 - RNA, 22 nt, Artificial Sequence
  SAMD9L targeting guide sequence portion
caggccuauguccccaggccua

SEQ ID NO: 14090 - RNA, 22 nt, Artificial Sequence
  SAMD9L targeting guide sequence portion
caggggaguuuaaaagaaauag

SEQ ID NO: 14091 - RNA, 22 nt, Artificial Sequence
  SAMD9L targeting guide sequence portion
cagggucagcagcagacacagc

SEQ ID NO: 14092 - RNA, 22 nt, Artificial Sequence
  SAMD9L targeting guide sequence portion
caggguucuucuggccuauauu

SEQ ID NO: 14093 - RNA, 22 nt, Artificial Sequence
  SAMD9L targeting guide sequence portion
cagguaucuuagagagcuuccu

SEQ ID NO: 14094 - RNA, 22 nt, Artificial Sequence
  SAMD9L targeting guide sequence portion
caguaacaggaucucccaagug

SEQ ID NO: 14095 - RNA, 22 nt, Artificial Sequence
  SAMD9L targeting guide sequence portion
caguccaccaguccauacagua

SEQ ID NO: 14096 - RNA, 22 nt, Artificial Sequence
  SAMD9L targeting guide sequence portion
caguccauacaguaacaggauc

SEQ ID NO: 14097 - RNA, 22 nt, Artificial Sequence
  SAMD9L targeting guide sequence portion
caguugccucccucuucugcag

SEQ ID NO: 14098 - RNA, 22 nt, Artificial Sequence
  SAMD9L targeting guide sequence portion
cauaacuaaaggcuugauguag

SEQ ID NO: 14099 - RNA, 22 nt, Artificial Sequence
  SAMD9L targeting guide sequence portion
cauaauuaucuuuagaguuaau

SEQ ID NO: 14100 - RNA, 22 nt, Artificial Sequence
  SAMD9L targeting guide sequence portion
cauacaguaacaggaucuccca

SEQ ID NO: 14101 - RNA, 22 nt, Artificial Sequence
  SAMD9L targeting guide sequence portion
cauagaaauauaggccagaaga

SEQ ID NO: 14102 - RNA, 22 nt, Artificial Sequence
  SAMD9L targeting guide sequence portion
cauagacuucuugaugacaaga

SEQ ID NO: 14103 - RNA, 22 nt, Artificial Sequence
  SAMD9L targeting guide sequence portion
cauaggccugauccuauuucuu

SEQ ID NO: 14104 - RNA, 22 nt, Artificial Sequence
  SAMD9L targeting guide sequence portion
cauaggccuggggacauaggcc

SEQ ID NO: 14105 - RNA, 22 nt, Artificial Sequence
  SAMD9L targeting guide sequence portion
caucaagaagucuaugcucuau

SEQ ID NO: 14106 - RNA, 22 nt, Artificial Sequence
  SAMD9L targeting guide sequence portion
caucaagccuuuaguuaugucu

SEQ ID NO: 14107 - RNA, 22 nt, Artificial Sequence
  SAMD9L targeting guide sequence portion
caucuuuguaucucuuuguaau

SEQ ID NO: 14108 - RNA, 22 nt, Artificial Sequence
  SAMD9L targeting guide sequence portion
caugguccagaacaugucccuc

SEQ ID NO: 14109 - RNA, 22 nt, Artificial Sequence
  SAMD9L targeting guide sequence portion
caugucccucuuucugaaagcu

SEQ ID NO: 14110 - RNA, 22 nt, Artificial Sequence
  SAMD9L targeting guide sequence portion
caugugagcguugcccagauuc

SEQ ID NO: 14111 - RNA, 22 nt, Artificial Sequence
  SAMD9L targeting guide sequence portion
cauguucuggaccaugugagcg

SEQ ID NO: 14112 - RNA, 22 nt, Artificial Sequence
  SAMD9L targeting guide sequence portion
cauuauaacuuuuuucucuaca

SEQ ID NO: 14113 - RNA, 22 nt, Artificial Sequence
  SAMD9L targeting guide sequence portion
cauuuaguaagacauaacuaaa

SEQ ID NO: 14114 - RNA, 22 nt, Artificial Sequence
  SAMD9L targeting guide sequence portion
ccaaacaguugccucccucuuc

SEQ ID NO: 14115 - RNA, 22 nt, Artificial Sequence
  SAMD9L targeting guide sequence portion
ccaaacccaauucuucuuguca

SEQ ID NO: 14116 - RNA, 22 nt, Artificial Sequence
  SAMD9L targeting guide sequence portion
ccaaguggcuauacuccccaag

SEQ ID NO: 14117 - RNA, 22 nt, Artificial Sequence
  SAMD9L targeting guide sequence portion
ccaaguuguucauaggccuggg

SEQ ID NO: 14118 - RNA, 22 nt, Artificial Sequence
  SAMD9L targeting guide sequence portion
ccaauucuucuugucaucaaga

SEQ ID NO: 14119 - RNA, 22 nt, Artificial Sequence
  SAMD9L targeting guide sequence portion
ccaccaccagguaucuuagaga

SEQ ID NO: 14120 - RNA, 22 nt, Artificial Sequence
  SAMD9L targeting guide sequence portion
ccaccagguaucuuagagagcu

SEQ ID NO: 14121 - RNA, 22 nt, Artificial Sequence
  SAMD9L targeting guide sequence portion
ccaccaguccauacaguaacag

SEQ ID NO: 14122 - RNA, 22 nt, Artificial Sequence
  SAMD9L targeting guide sequence portion
ccacuugggagauccuguuacu

SEQ ID NO: 14123 - RNA, 22 nt, Artificial Sequence
  SAMD9L targeting guide sequence portion
ccagaacaugucccucuuucug

SEQ ID NO: 14124 - RNA, 22 nt, Artificial Sequence
  SAMD9L targeting guide sequence portion
ccagaagaacccugauagagca

SEQ ID NO: 14125 - RNA, 22 nt, Artificial Sequence
  SAMD9L targeting guide sequence portion
ccagaauaucuaaguuacauua

SEQ ID NO: 14126 - RNA, 22 nt, Artificial Sequence
  SAMD9L targeting guide sequence portion
ccagauucauagaaauauaggc

SEQ ID NO: 14127 - RNA, 22 nt, Artificial Sequence
  SAMD9L targeting guide sequence portion
ccagcaggggaguuuaaaagaa

SEQ ID NO: 14128 - RNA, 22 nt, Artificial Sequence
  SAMD9L targeting guide sequence portion
ccaggccuaugaacaacuuggg

SEQ ID NO: 14129 - RNA, 22 nt, Artificial Sequence
  SAMD9L targeting guide sequence portion
ccagguaucuuagagagcuucc

SEQ ID NO: 14130 - RNA, 22 nt, Artificial Sequence
  SAMD9L targeting guide sequence portion
ccaguccauacaguaacaggau

SEQ ID NO: 14131 - RNA, 22 nt, Artificial Sequence
  SAMD9L targeting guide sequence portion
ccauaauuaucuuuagaguuaa

SEQ ID NO: 14132 - RNA, 22 nt, Artificial Sequence
  SAMD9L targeting guide sequence portion
ccauacaguaacaggaucuccc

SEQ ID NO: 14133 - RNA, 22 nt, Artificial Sequence
  SAMD9L targeting guide sequence portion
ccaugugagcguugcccagauu

SEQ ID NO: 14134 - RNA, 22 nt, Artificial Sequence
  SAMD9L targeting guide sequence portion
cccaaguggcuauacuccccaa

SEQ ID NO: 14135 - RNA, 22 nt, Artificial Sequence
  SAMD9L targeting guide sequence portion
cccaaguuguucauaggccugg

SEQ ID NO: 14136 - RNA, 22 nt, Artificial Sequence
  SAMD9L targeting guide sequence portion
cccaauucuucuugucaucaag

SEQ ID NO: 14137 - RNA, 22 nt, Artificial Sequence
  SAMD9L targeting guide sequence portion
cccaccaccagguaucuuagag

SEQ ID NO: 14138 - RNA, 22 nt, Artificial Sequence
  SAMD9L targeting guide sequence portion
cccagauucauagaaauauagg

SEQ ID NO: 14139 - RNA, 22 nt, Artificial Sequence
  SAMD9L targeting guide sequence portion
cccaggccuaugaacaacuugg

SEQ ID NO: 14140 - RNA, 22 nt, Artificial Sequence
  SAMD9L targeting guide sequence portion
ccccaaguuguucauaggccug

SEQ ID NO: 14141 - RNA, 22 nt, Artificial Sequence
  SAMD9L targeting guide sequence portion
ccccaccaccagguaucuuaga

SEQ ID NO: 14142 - RNA, 22 nt, Artificial Sequence
  SAMD9L targeting guide sequence portion
ccccaggccuaugaacaacuug

SEQ ID NO: 14143 - RNA, 22 nt, Artificial Sequence
  SAMD9L targeting guide sequence portion
ccccugcuggacuauaacauuu

SEQ ID NO: 14144 - RNA, 22 nt, Artificial Sequence
  SAMD9L targeting guide sequence portion
cccucuucugcaguccaccagu

SEQ ID NO: 14145 - RNA, 22 nt, Artificial Sequence
  SAMD9L targeting guide sequence portion
cccucuuucugaaagcuguguc

SEQ ID NO: 14146 - RNA, 22 nt, Artificial Sequence
  SAMD9L targeting guide sequence portion
cccugauagagcauagacuucu

SEQ ID NO: 14147 - RNA, 22 nt, Artificial Sequence
  SAMD9L targeting guide sequence portion
cccugcuccaaacaguugccuc

SEQ ID NO: 14148 - RNA, 22 nt, Artificial Sequence
  SAMD9L targeting guide sequence portion
cccugcuggacuauaacauuua

SEQ ID NO: 14149 - RNA, 22 nt, Artificial Sequence
  SAMD9L targeting guide sequence portion
ccuauauuucuaugaaucuggg

SEQ ID NO: 14150 - RNA, 22 nt, Artificial Sequence
  SAMD9L targeting guide sequence portion
ccuaugaacaacuuggggagua

SEQ ID NO: 14151 - RNA, 22 nt, Artificial Sequence
  SAMD9L targeting guide sequence portion
ccuauguccccaggccuaugaa

SEQ ID NO: 14152 - RNA, 22 nt, Artificial Sequence
  SAMD9L targeting guide sequence portion
ccuauuucuuuuaaacuccccu

SEQ ID NO: 14153 - RNA, 22 nt, Artificial Sequence
  SAMD9L targeting guide sequence portion
ccucccucuucugcaguccacc

SEQ ID NO: 14154 - RNA, 22 nt, Artificial Sequence
  SAMD9L targeting guide sequence portion
ccuccuuucauuauaacuuuuu

SEQ ID NO: 14155 - RNA, 22 nt, Artificial Sequence
  SAMD9L targeting guide sequence portion
ccucuucugcaguccaccaguc

SEQ ID NO: 14156 - RNA, 22 nt, Artificial Sequence
  SAMD9L targeting guide sequence portion
ccucuuucugaaagcugugucu

SEQ ID NO: 14157 - RNA, 22 nt, Artificial Sequence
  SAMD9L targeting guide sequence portion
ccugauagagcauagacuucuu

SEQ ID NO: 14158 - RNA, 22 nt, Artificial Sequence
  SAMD9L targeting guide sequence portion
ccugauccuauuucuuuuaaac

SEQ ID NO: 14159 - RNA, 22 nt, Artificial Sequence
  SAMD9L targeting guide sequence portion
ccugcuaaccauaauuaucuuu

SEQ ID NO: 14160 - RNA, 22 nt, Artificial Sequence
  SAMD9L targeting guide sequence portion
ccugcuccaaacaguugccucc

SEQ ID NO: 14161 - RNA, 22 nt, Artificial Sequence
  SAMD9L targeting guide sequence portion
ccugcuggacuauaacauuuag

SEQ ID NO: 14162 - RNA, 22 nt, Artificial Sequence
  SAMD9L targeting guide sequence portion
ccuggggacauaggccugaucc

SEQ ID NO: 14163 - RNA, 22 nt, Artificial Sequence
  SAMD9L targeting guide sequence portion
ccuggugguggggucagaauua

SEQ ID NO: 14164 - RNA, 22 nt, Artificial Sequence
  SAMD9L targeting guide sequence portion
ccuguuacuguauggacuggug

SEQ ID NO: 14165 - RNA, 22 nt, Artificial Sequence
  SAMD9L targeting guide sequence portion
ccuucuccuuagcccccauuuc

SEQ ID NO: 14166 - RNA, 22 nt, Artificial Sequence
  SAMD9L targeting guide sequence portion
ccuuuaguuaugucuuacuaaa

SEQ ID NO: 14167 - RNA, 22 nt, Artificial Sequence
  SAMD9L targeting guide sequence portion
ccuuucauuauaacuuuuuucu

SEQ ID NO: 14168 - RNA, 22 nt, Artificial Sequence
  SAMD9L targeting guide sequence portion
cgcucacaugguccagaacaug

SEQ ID NO: 14169 - RNA, 22 nt, Artificial Sequence
  SAMD9L targeting guide sequence portion
cguugcccagauucauagaaau

SEQ ID NO: 14170 - RNA, 22 nt, Artificial Sequence
  SAMD9L targeting guide sequence portion
cuaaagauaauuaugguuagca

SEQ ID NO: 14171 - RNA, 22 nt, Artificial Sequence
  SAMD9L targeting guide sequence portion
cuaaaggcuugauguagagaaa

SEQ ID NO: 14172 - RNA, 22 nt, Artificial Sequence
  SAMD9L targeting guide sequence portion
cuaaauauuccugcuaaccaua

SEQ ID NO: 14173 - RNA, 22 nt, Artificial Sequence
  SAMD9L targeting guide sequence portion
cuaaauguuauaguccagcagg

SEQ ID NO: 14174 - RNA, 22 nt, Artificial Sequence
  SAMD9L targeting guide sequence portion
cuaaccauaauuaucuuuagag

SEQ ID NO: 14175 - RNA, 22 nt, Artificial Sequence
  SAMD9L targeting guide sequence portion
cuaagauaccuggugguggggu

SEQ ID NO: 14176 - RNA, 22 nt, Artificial Sequence
  SAMD9L targeting guide sequence portion
cuaaggagaaggaagcucucua

SEQ ID NO: 14177 - RNA, 22 nt, Artificial Sequence
  SAMD9L targeting guide sequence portion
cuaaguuacauuacaaagagau

SEQ ID NO: 14178 - RNA, 22 nt, Artificial Sequence
  SAMD9L targeting guide sequence portion
cuacaucaagccuuuaguuaug

SEQ ID NO: 14179 - RNA, 22 nt, Artificial Sequence
  SAMD9L targeting guide sequence portion
cuacuaaauauuccugcuaacc

SEQ ID NO: 14180 - RNA, 22 nt, Artificial Sequence
  SAMD9L targeting guide sequence portion
cuauaacauuuaguaagacaua

SEQ ID NO: 14181 - RNA, 22 nt, Artificial Sequence
  SAMD9L targeting guide sequence portion
cuauacuccccaaguuguucau

SEQ ID NO: 14182 - RNA, 22 nt, Artificial Sequence
  SAMD9L targeting guide sequence portion
cuauauuucuaugaaucugggc

SEQ ID NO: 14183 - RNA, 22 nt, Artificial Sequence
  SAMD9L targeting guide sequence portion
cuaucaggguucuucuggccua

SEQ ID NO: 14184 - RNA, 22 nt, Artificial Sequence
  SAMD9L targeting guide sequence portion
cuaugaacaacuuggggaguau

SEQ ID NO: 14185 - RNA, 22 nt, Artificial Sequence
  SAMD9L targeting guide sequence portion
cuaugaaucugggcaacgcuca

SEQ ID NO: 14186 - RNA, 22 nt, Artificial Sequence
  SAMD9L targeting guide sequence portion
cuaugcucuaucaggguucuuc

SEQ ID NO: 14187 - RNA, 22 nt, Artificial Sequence
  SAMD9L targeting guide sequence portion
cuauguccccaggccuaugaac

SEQ ID NO: 14188 - RNA, 22 nt, Artificial Sequence
  SAMD9L targeting guide sequence portion
cuauuucuuuuaaacuccccug

SEQ ID NO: 14189 - RNA, 22 nt, Artificial Sequence
  SAMD9L targeting guide sequence portion
cucacaugguccagaacauguc

SEQ ID NO: 14190 - RNA, 22 nt, Artificial Sequence
  SAMD9L targeting guide sequence portion
cuccaaacaguugccucccucu

SEQ ID NO: 14191 - RNA, 22 nt, Artificial Sequence
  SAMD9L targeting guide sequence portion
cuccaaacccaauucuucuugu

SEQ ID NO: 14192 - RNA, 22 nt, Artificial Sequence
  SAMD9L targeting guide sequence portion
cucccaaguggcuauacucccc

SEQ ID NO: 14193 - RNA, 22 nt, Artificial Sequence
  SAMD9L targeting guide sequence portion
cuccccaaguuguucauaggcc

SEQ ID NO: 14194 - RNA, 22 nt, Artificial Sequence
  SAMD9L targeting guide sequence portion
cuccccugcuggacuauaacau

SEQ ID NO: 14195 - RNA, 22 nt, Artificial Sequence
  SAMD9L targeting guide sequence portion
cucccucuucugcaguccacca

SEQ ID NO: 14196 - RNA, 22 nt, Artificial Sequence
  SAMD9L targeting guide sequence portion
cuccuuucauuauaacuuuuuu

SEQ ID NO: 14197 - RNA, 22 nt, Artificial Sequence
  SAMD9L targeting guide sequence portion
cucuaaagauaauuaugguuag

SEQ ID NO: 14198 - RNA, 22 nt, Artificial Sequence
  SAMD9L targeting guide sequence portion
cucuaagauaccuggugguggg

SEQ ID NO: 14199 - RNA, 22 nt, Artificial Sequence
  SAMD9L targeting guide sequence portion
cucuacaucaagccuuuaguua

SEQ ID NO: 14200 - RNA, 22 nt, Artificial Sequence
  SAMD9L targeting guide sequence portion
cucuaucaggguucuucuggcc

SEQ ID NO: 14201 - RNA, 22 nt, Artificial Sequence
  SAMD9L targeting guide sequence portion
cucucuaagauaccugguggug

SEQ ID NO: 14202 - RNA, 22 nt, Artificial Sequence
  SAMD9L targeting guide sequence portion
cucuucugcaguccaccagucc

SEQ ID NO: 14203 - RNA, 22 nt, Artificial Sequence
  SAMD9L targeting guide sequence portion
cucuuucugaaagcugugucug

SEQ ID NO: 14204 - RNA, 22 nt, Artificial Sequence
  SAMD9L targeting guide sequence portion
cucuuuguaauguaacuuagau

SEQ ID NO: 14205 - RNA, 22 nt, Artificial Sequence
  SAMD9L targeting guide sequence portion
cugaaagcugugucugcugcug

SEQ ID NO: 14206 - RNA, 22 nt, Artificial Sequence
  SAMD9L targeting guide sequence portion
cugaccccaccaccagguaucu

SEQ ID NO: 14207 - RNA, 22 nt, Artificial Sequence
  SAMD9L targeting guide sequence portion
cugacccugcuccaaacaguug

SEQ ID NO: 14208 - RNA, 22 nt, Artificial Sequence
  SAMD9L targeting guide sequence portion
cugauagagcauagacuucuug

SEQ ID NO: 14209 - RNA, 22 nt, Artificial Sequence
  SAMD9L targeting guide sequence portion
cugauccuauuucuuuuaaacu

SEQ ID NO: 14210 - RNA, 22 nt, Artificial Sequence
  SAMD9L targeting guide sequence portion
cugcagaagagggaggcaacug

SEQ ID NO: 14211 - RNA, 22 nt, Artificial Sequence
  SAMD9L targeting guide sequence portion
cugcaguccaccaguccauaca

SEQ ID NO: 14212 - RNA, 22 nt, Artificial Sequence
  SAMD9L targeting guide sequence portion
cugcuaaccauaauuaucuuua

SEQ ID NO: 14213 - RNA, 22 nt, Artificial Sequence
  SAMD9L targeting guide sequence portion
cugcuccaaacaguugccuccc

SEQ ID NO: 14214 - RNA, 22 nt, Artificial Sequence
  SAMD9L targeting guide sequence portion
cugcugacccugcuccaaacag

SEQ ID NO: 14215 - RNA, 22 nt, Artificial Sequence
  SAMD9L targeting guide sequence portion
cugcugcugacccugcuccaaa

SEQ ID NO: 14216 - RNA, 22 nt, Artificial Sequence
  SAMD9L targeting guide sequence portion
cugcuggacuauaacauuuagu

SEQ ID NO: 14217 - RNA, 22 nt, Artificial Sequence
  SAMD9L targeting guide sequence portion
cuggaccaugugagcguugccc

SEQ ID NO: 14218 - RNA, 22 nt, Artificial Sequence
  SAMD9L targeting guide sequence portion
cuggacuauaacauuuaguaag

SEQ ID NO: 14219 - RNA, 22 nt, Artificial Sequence
  SAMD9L targeting guide sequence portion
cuggacuccaaacccaauucuu

SEQ ID NO: 14220 - RNA, 22 nt, Artificial Sequence
  SAMD9L targeting guide sequence portion
cuggccuauauuucuaugaauc

SEQ ID NO: 14221 - RNA, 22 nt, Artificial Sequence
  SAMD9L targeting guide sequence portion
cugggcaacgcucacauggucc

SEQ ID NO: 14222 - RNA, 22 nt, Artificial Sequence
  SAMD9L targeting guide sequence portion
cuggggacauaggccugauccu

SEQ ID NO: 14223 - RNA, 22 nt, Artificial Sequence
  SAMD9L targeting guide sequence portion
cugguggacugcagaagaggga

SEQ ID NO: 14224 - RNA, 22 nt, Artificial Sequence
  SAMD9L targeting guide sequence portion
cuggugguggggucagaauuau

SEQ ID NO: 14225 - RNA, 22 nt, Artificial Sequence
  SAMD9L targeting guide sequence portion
cuguauggacugguggacugca

SEQ ID NO: 14226 - RNA, 22 nt, Artificial Sequence
  SAMD9L targeting guide sequence portion
cugugucugcugcugacccugc

SEQ ID NO: 14227 - RNA, 22 nt, Artificial Sequence
  SAMD9L targeting guide sequence portion
cuguuacuguauggacuggugg

SEQ ID NO: 14228 - RNA, 22 nt, Artificial Sequence
  SAMD9L targeting guide sequence portion
cuguugaaaugggggcuaagga

SEQ ID NO: 14229 - RNA, 22 nt, Artificial Sequence
  SAMD9L targeting guide sequence portion
cuguuuggagcagggucagcag

SEQ ID NO: 14230 - RNA, 22 nt, Artificial Sequence
  SAMD9L targeting guide sequence portion
cuuacuaaauguuauaguccag

SEQ ID NO: 14231 - RNA, 22 nt, Artificial Sequence
  SAMD9L targeting guide sequence portion
cuuagagagcuuccuucuccuu

SEQ ID NO: 14232 - RNA, 22 nt, Artificial Sequence
  SAMD9L targeting guide sequence portion
cuuagauauucuggacuccaaa

SEQ ID NO: 14233 - RNA, 22 nt, Artificial Sequence
  SAMD9L targeting guide sequence portion
cuuccuucuccuuagcccccau

SEQ ID NO: 14234 - RNA, 22 nt, Artificial Sequence
  SAMD9L targeting guide sequence portion
cuucuccuuagcccccauuuca

SEQ ID NO: 14235 - RNA, 22 nt, Artificial Sequence
  SAMD9L targeting guide sequence portion
cuucugcaguccaccaguccau

SEQ ID NO: 14236 - RNA, 22 nt, Artificial Sequence
  SAMD9L targeting guide sequence portion
cuucuggccuauauuucuauga

SEQ ID NO: 14237 - RNA, 22 nt, Artificial Sequence
  SAMD9L targeting guide sequence portion
cuucuugaugacaagaagaauu

SEQ ID NO: 14238 - RNA, 22 nt, Artificial Sequence
  SAMD9L targeting guide sequence portion
cuucuugucaucaagaagucua

SEQ ID NO: 14239 - RNA, 22 nt, Artificial Sequence
  SAMD9L targeting guide sequence portion
cuugaugacaagaagaauuggg

SEQ ID NO: 14240 - RNA, 22 nt, Artificial Sequence
  SAMD9L targeting guide sequence portion
cuugauguagagaaaaaaguua

SEQ ID NO: 14241 - RNA, 22 nt, Artificial Sequence
  SAMD9L targeting guide sequence portion
cuugggagauccuguuacugua

SEQ ID NO: 14242 - RNA, 22 nt, Artificial Sequence
  SAMD9L targeting guide sequence portion
cuuggggaguauagccacuugg

SEQ ID NO: 14243 - RNA, 22 nt, Artificial Sequence
  SAMD9L targeting guide sequence portion
cuugucaucaagaagucuaugc

SEQ ID NO: 14244 - RNA, 22 nt, Artificial Sequence
  SAMD9L targeting guide sequence portion
cuuuagaguuaauaauucugac

SEQ ID NO: 14245 - RNA, 22 nt, Artificial Sequence
  SAMD9L targeting guide sequence portion
cuuuaguuaugucuuacuaaau

SEQ ID NO: 14246 - RNA, 22 nt, Artificial Sequence
  SAMD9L targeting guide sequence portion
cuuucagaaagagggacauguu

SEQ ID NO: 14247 - RNA, 22 nt, Artificial Sequence
  SAMD9L targeting guide sequence portion
cuuucauuauaacuuuuuucuc

SEQ ID NO: 14248 - RNA, 22 nt, Artificial Sequence
  SAMD9L targeting guide sequence portion
cuuucugaaagcugugucugcu

SEQ ID NO: 14249 - RNA, 22 nt, Artificial Sequence
  SAMD9L targeting guide sequence portion
cuuuguaauguaacuuagauau

SEQ ID NO: 14250 - RNA, 22 nt, Artificial Sequence
  SAMD9L targeting guide sequence portion
cuuuguaucucuuuguaaugua

SEQ ID NO: 14251 - RNA, 22 nt, Artificial Sequence
  SAMD9L targeting guide sequence portion
cuuuuaaacuccccugcuggac

SEQ ID NO: 14252 - RNA, 22 nt, Artificial Sequence
  SAMD9L targeting guide sequence portion
cuuuuuucucuacaucaagccu

SEQ ID NO: 14253 - RNA, 22 nt, Artificial Sequence
  SAMD9L targeting guide sequence portion
gaaaaaaguuauaaugaaagga

SEQ ID NO: 14254 - RNA, 22 nt, Artificial Sequence
  SAMD9L targeting guide sequence portion
gaaaaacuacuaaauauuccug

SEQ ID NO: 14255 - RNA, 22 nt, Artificial Sequence
  SAMD9L targeting guide sequence portion
gaaagagggacauguucuggac

SEQ ID NO: 14256 - RNA, 22 nt, Artificial Sequence
  SAMD9L targeting guide sequence portion
gaaagcugugucugcugcugac

SEQ ID NO: 14257 - RNA, 22 nt, Artificial Sequence
  SAMD9L targeting guide sequence portion
gaaaggaggaaaaacuacuaaa

SEQ ID NO: 14258 - RNA, 22 nt, Artificial Sequence
  SAMD9L targeting guide sequence portion
gaaauaggaucaggccuauguc

SEQ ID NO: 14259 - RNA, 22 nt, Artificial Sequence
  SAMD9L targeting guide sequence portion
gaaauauaggccagaagaaccc

SEQ ID NO: 14260 - RNA, 22 nt, Artificial Sequence
  SAMD9L targeting guide sequence portion
gaaaugggggcuaaggagaagg

SEQ ID NO: 14261 - RNA, 22 nt, Artificial Sequence
  SAMD9L targeting guide sequence portion
gaacaacuuggggaguauagcc

SEQ ID NO: 14262 - RNA, 22 nt, Artificial Sequence
  SAMD9L targeting guide sequence portion
gaacaugucccucuuucugaaa

SEQ ID NO: 14263 - RNA, 22 nt, Artificial Sequence
  SAMD9L targeting guide sequence portion
gaacccugauagagcauagacu

SEQ ID NO: 14264 - RNA, 22 nt, Artificial Sequence
  SAMD9L targeting guide sequence portion
gaagaacccugauagagcauag

SEQ ID NO: 14265 - RNA, 22 nt, Artificial Sequence
  SAMD9L targeting guide sequence portion
gaagaauuggguuuggagucca

SEQ ID NO: 14266 - RNA, 22 nt, Artificial Sequence
  SAMD9L targeting guide sequence portion
gaagagggaggcaacuguuugg

SEQ ID NO: 14267 - RNA, 22 nt, Artificial Sequence
  SAMD9L targeting guide sequence portion
gaagcucucuaagauaccuggu

SEQ ID NO: 14268 - RNA, 22 nt, Artificial Sequence
  SAMD9L targeting guide sequence portion
gaaggaagcucucuaagauacc

SEQ ID NO: 14269 - RNA, 22 nt, Artificial Sequence
  SAMD9L targeting guide sequence portion
gaagucuaugcucuaucagggu

SEQ ID NO: 14270 - RNA, 22 nt, Artificial Sequence
  SAMD9L targeting guide sequence portion
gaauaucuaaguuacauuacaa

SEQ ID NO: 14271 - RNA, 22 nt, Artificial Sequence
  SAMD9L targeting guide sequence portion
gaauauuuaguaguuuuuccuc

SEQ ID NO: 14272 - RNA, 22 nt, Artificial Sequence
  SAMD9L targeting guide sequence portion
gaaucugggcaacgcucacaug

SEQ ID NO: 14273 - RNA, 22 nt, Artificial Sequence
  SAMD9L targeting guide sequence portion
gaauuauuaacucuaaagauaa

SEQ ID NO: 14274 - RNA, 22 nt, Artificial Sequence
  SAMD9L targeting guide sequence portion
gaauuggguuuggaguccagaa

SEQ ID NO: 14275 - RNA, 22 nt, Artificial Sequence
  SAMD9L targeting guide sequence portion
gacaagaagaauuggguuugga

SEQ ID NO: 14276 - RNA, 22 nt, Artificial Sequence
  SAMD9L targeting guide sequence portion
gacacagcuuucagaaagaggg

SEQ ID NO: 14277 - RNA, 22 nt, Artificial Sequence
  SAMD9L targeting guide sequence portion
gacauaacuaaaggcuugaugu

SEQ ID NO: 14278 - RNA, 22 nt, Artificial Sequence
  SAMD9L targeting guide sequence portion
gacauaggccugauccuauuuc

SEQ ID NO: 14279 - RNA, 22 nt, Artificial Sequence
  SAMD9L targeting guide sequence portion
gacauguucuggaccaugugag

SEQ ID NO: 14280 - RNA, 22 nt, Artificial Sequence
  SAMD9L targeting guide sequence portion
gaccaugugagcguugcccaga

SEQ ID NO: 14281 - RNA, 22 nt, Artificial Sequence
  SAMD9L targeting guide sequence portion
gaccccaccaccagguaucuua

SEQ ID NO: 14282 - RNA, 22 nt, Artificial Sequence
  SAMD9L targeting guide sequence portion
gacccugcuccaaacaguugcc

SEQ ID NO: 14283 - RNA, 22 nt, Artificial Sequence
  SAMD9L targeting guide sequence portion
gacuauaacauuuaguaagaca

SEQ ID NO: 14284 - RNA, 22 nt, Artificial Sequence
  SAMD9L targeting guide sequence portion
gacuccaaacccaauucuucuu

SEQ ID NO: 14285 - RNA, 22 nt, Artificial Sequence
  SAMD9L targeting guide sequence portion
gacugcagaagagggaggcaac

SEQ ID NO: 14286 - RNA, 22 nt, Artificial Sequence
  SAMD9L targeting guide sequence portion
gacugguggacugcagaagagg

SEQ ID NO: 14287 - RNA, 22 nt, Artificial Sequence
  SAMD9L targeting guide sequence portion
gacuucuugaugacaagaagaa

SEQ ID NO: 14288 - RNA, 22 nt, Artificial Sequence
  SAMD9L targeting guide sequence portion
gagaaaaaaguuauaaugaaag

SEQ ID NO: 14289 - RNA, 22 nt, Artificial Sequence
  SAMD9L targeting guide sequence portion
gagaaggaagcucucuaagaua

SEQ ID NO: 14290 - RNA, 22 nt, Artificial Sequence
  SAMD9L targeting guide sequence portion
gagagcuuccuucuccuuagcc

SEQ ID NO: 14291 - RNA, 22 nt, Artificial Sequence
  SAMD9L targeting guide sequence portion
gagauccuguuacuguauggac

SEQ ID NO: 14292 - RNA, 22 nt, Artificial Sequence
  SAMD9L targeting guide sequence portion
gagcagggucagcagcagacac

SEQ ID NO: 14293 - RNA, 22 nt, Artificial Sequence
  SAMD9L targeting guide sequence portion
gagcauagacuucuugaugaca

SEQ ID NO: 14294 - RNA, 22 nt, Artificial Sequence
  SAMD9L targeting guide sequence portion
gagcguugcccagauucauaga

SEQ ID NO: 14295 - RNA, 22 nt, Artificial Sequence
  SAMD9L targeting guide sequence portion
gagcuuccuucuccuuagcccc

SEQ ID NO: 14296 - RNA, 22 nt, Artificial Sequence
  SAMD9L targeting guide sequence portion
gaggaaaaacuacuaaauauuc

SEQ ID NO: 14297 - RNA, 22 nt, Artificial Sequence
  SAMD9L targeting guide sequence portion
gaggcaacuguuuggagcaggg

SEQ ID NO: 14298 - RNA, 22 nt, Artificial Sequence
  SAMD9L targeting guide sequence portion
gagggacauguucuggaccaug

SEQ ID NO: 14299 - RNA, 22 nt, Artificial Sequence
  SAMD9L targeting guide sequence portion
gagggaggcaacuguuuggagc

SEQ ID NO: 14300 - RNA, 22 nt, Artificial Sequence
  SAMD9L targeting guide sequence portion
gaguauagccacuugggagauc

SEQ ID NO: 14301 - RNA, 22 nt, Artificial Sequence
  SAMD9L targeting guide sequence portion
gaguccagaauaucuaaguuac

SEQ ID NO: 14302 - RNA, 22 nt, Artificial Sequence
  SAMD9L targeting guide sequence portion
gaguuaauaauucugaccccac

SEQ ID NO: 14303 - RNA, 22 nt, Artificial Sequence
  SAMD9L targeting guide sequence portion
gaguuuaaaagaaauaggauca

SEQ ID NO: 14304 - RNA, 22 nt, Artificial Sequence
  SAMD9L targeting guide sequence portion
gauaauuaugguuagcaggaau

SEQ ID NO: 14305 - RNA, 22 nt, Artificial Sequence
  SAMD9L targeting guide sequence portion
gauaccuggugguggggucaga

SEQ ID NO: 14306 - RNA, 22 nt, Artificial Sequence
  SAMD9L targeting guide sequence portion
gauagagcauagacuucuugau

SEQ ID NO: 14307 - RNA, 22 nt, Artificial Sequence
  SAMD9L targeting guide sequence portion
gauauucuggacuccaaaccca

SEQ ID NO: 14308 - RNA, 22 nt, Artificial Sequence
  SAMD9L targeting guide sequence portion
gaucaggccuauguccccaggc

SEQ ID NO: 14309 - RNA, 22 nt, Artificial Sequence
  SAMD9L targeting guide sequence portion
gauccuauuucuuuuaaacucc

SEQ ID NO: 14310 - RNA, 22 nt, Artificial Sequence
  SAMD9L targeting guide sequence portion
gauccuguuacuguauggacug

SEQ ID NO: 14311 - RNA, 22 nt, Artificial Sequence
  SAMD9L targeting guide sequence portion
gaucucccaaguggcuauacuc

SEQ ID NO: 14312 - RNA, 22 nt, Artificial Sequence
  SAMD9L targeting guide sequence portion
gaugacaagaagaauuggguuu

SEQ ID NO: 14313 - RNA, 22 nt, Artificial Sequence
  SAMD9L targeting guide sequence portion
gauguagagaaaaaaguuauaa

SEQ ID NO: 14314 - RNA, 22 nt, Artificial Sequence
  SAMD9L targeting guide sequence portion
gauucauagaaauauaggccag

SEQ ID NO: 14315 - RNA, 22 nt, Artificial Sequence
  SAMD9L targeting guide sequence portion
gcaacgcucacaugguccagaa

SEQ ID NO: 14316 - RNA, 22 nt, Artificial Sequence
  SAMD9L targeting guide sequence portion
gcaacuguuuggagcaggguca

SEQ ID NO: 14317 - RNA, 22 nt, Artificial Sequence
  SAMD9L targeting guide sequence portion
gcagaagagggaggcaacuguu

SEQ ID NO: 14318 - RNA, 22 nt, Artificial Sequence
  SAMD9L targeting guide sequence portion
gcagacacagcuuucagaaaga

SEQ ID NO: 14319 - RNA, 22 nt, Artificial Sequence
  SAMD9L targeting guide sequence portion
gcagcagacacagcuuucagaa

SEQ ID NO: 14320 - RNA, 22 nt, Artificial Sequence
  SAMD9L targeting guide sequence portion
gcaggaauauuuaguaguuuuu

SEQ ID NO: 14321 - RNA, 22 nt, Artificial Sequence
  SAMD9L targeting guide sequence portion
gcaggggaguuuaaaagaaaua

SEQ ID NO: 14322 - RNA, 22 nt, Artificial Sequence
  SAMD9L targeting guide sequence portion
gcagggucagcagcagacacag

SEQ ID NO: 14323 - RNA, 22 nt, Artificial Sequence
  SAMD9L targeting guide sequence portion
gcaguccaccaguccauacagu

SEQ ID NO: 14324 - RNA, 22 nt, Artificial Sequence
  SAMD9L targeting guide sequence portion
gcauagacuucuugaugacaag

SEQ ID NO: 14325 - RNA, 22 nt, Artificial Sequence
  SAMD9L targeting guide sequence portion
gccacuugggagauccuguuac

SEQ ID NO: 14326 - RNA, 22 nt, Artificial Sequence
  SAMD9L targeting guide sequence portion
gccagaagaacccugauagagc

SEQ ID NO: 14327 - RNA, 22 nt, Artificial Sequence
  SAMD9L targeting guide sequence portion
gcccagauucauagaaauauag

SEQ ID NO: 14328 - RNA, 22 nt, Artificial Sequence
  SAMD9L targeting guide sequence portion
gccuauauuucuaugaaucugg

SEQ ID NO: 14329 - RNA, 22 nt, Artificial Sequence
  SAMD9L targeting guide sequence portion
gccuaugaacaacuuggggagu

SEQ ID NO: 14330 - RNA, 22 nt, Artificial Sequence
  SAMD9L targeting guide sequence portion
gccuauguccccaggccuauga

SEQ ID NO: 14331 - RNA, 22 nt, Artificial Sequence
  SAMD9L targeting guide sequence portion
gccucccucuucugcaguccac

SEQ ID NO: 14332 - RNA, 22 nt, Artificial Sequence
  SAMD9L targeting guide sequence portion
gccugauccuauuucuuuuaaa

SEQ ID NO: 14333 - RNA, 22 nt, Artificial Sequence
  SAMD9L targeting guide sequence portion
gccuggggacauaggccugauc

SEQ ID NO: 14334 - RNA, 22 nt, Artificial Sequence
  SAMD9L targeting guide sequence portion
gccuuuaguuaugucuuacuaa

SEQ ID NO: 14335 - RNA, 22 nt, Artificial Sequence
  SAMD9L targeting guide sequence portion
gcguugcccagauucauagaaa

SEQ ID NO: 14336 - RNA, 22 nt, Artificial Sequence
  SAMD9L targeting guide sequence portion
gcuaaccauaauuaucuuuaga

SEQ ID NO: 14337 - RNA, 22 nt, Artificial Sequence
  SAMD9L targeting guide sequence portion
gcuaaggagaaggaagcucucu

SEQ ID NO: 14338 - RNA, 22 nt, Artificial Sequence
  SAMD9L targeting guide sequence portion
gcuauacuccccaaguuguuca

SEQ ID NO: 14339 - RNA, 22 nt, Artificial Sequence
  SAMD9L targeting guide sequence portion
gcucacaugguccagaacaugu

SEQ ID NO: 14340 - RNA, 22 nt, Artificial Sequence
  SAMD9L targeting guide sequence portion
gcuccaaacaguugccucccuc

SEQ ID NO: 14341 - RNA, 22 nt, Artificial Sequence
  SAMD9L targeting guide sequence portion
gcucuaucaggguucuucuggc

SEQ ID NO: 14342 - RNA, 22 nt, Artificial Sequence
  SAMD9L targeting guide sequence portion
gcucucuaagauaccugguggu

SEQ ID NO: 14343 - RNA, 22 nt, Artificial Sequence
  SAMD9L targeting guide sequence portion
gcugacccugcuccaaacaguu

SEQ ID NO: 14344 - RNA, 22 nt, Artificial Sequence
  SAMD9L targeting guide sequence portion
gcugcugacccugcuccaaaca

SEQ ID NO: 14345 - RNA, 22 nt, Artificial Sequence
  SAMD9L targeting guide sequence portion
gcuggacuauaacauuuaguaa

SEQ ID NO: 14346 - RNA, 22 nt, Artificial Sequence
  SAMD9L targeting guide sequence portion
gcugugucugcugcugacccug

SEQ ID NO: 14347 - RNA, 22 nt, Artificial Sequence
  SAMD9L targeting guide sequence portion
gcuguugaaaugggggcuaagg

SEQ ID NO: 14348 - RNA, 22 nt, Artificial Sequence
  SAMD9L targeting guide sequence portion
gcuuccuucuccuuagccccca

SEQ ID NO: 14349 - RNA, 22 nt, Artificial Sequence
  SAMD9L targeting guide sequence portion
gcuugauguagagaaaaaaguu

SEQ ID NO: 14350 - RNA, 22 nt, Artificial Sequence
  SAMD9L targeting guide sequence portion
gcuuucagaaagagggacaugu

SEQ ID NO: 14351 - RNA, 22 nt, Artificial Sequence
  SAMD9L targeting guide sequence portion
ggaaaaacuacuaaauauuccu

SEQ ID NO: 14352 - RNA, 22 nt, Artificial Sequence
  SAMD9L targeting guide sequence portion
ggaagcucucuaagauaccugg

SEQ ID NO: 14353 - RNA, 22 nt, Artificial Sequence
  SAMD9L targeting guide sequence portion
ggaauauuuaguaguuuuuccu

SEQ ID NO: 14354 - RNA, 22 nt, Artificial Sequence
  SAMD9L targeting guide sequence portion
ggacauaggccugauccuauuu

SEQ ID NO: 14355 - RNA, 22 nt, Artificial Sequence
  SAMD9L targeting guide sequence portion
ggacauguucuggaccauguga

SEQ ID NO: 14356 - RNA, 22 nt, Artificial Sequence
  SAMD9L targeting guide sequence portion
ggaccaugugagcguugcccag

SEQ ID NO: 14357 - RNA, 22 nt, Artificial Sequence
  SAMD9L targeting guide sequence portion
ggacuauaacauuuaguaagac

SEQ ID NO: 14358 - RNA, 22 nt, Artificial Sequence
  SAMD9L targeting guide sequence portion
ggacuccaaacccaauucuucu

SEQ ID NO: 14359 - RNA, 22 nt, Artificial Sequence
  SAMD9L targeting guide sequence portion
ggacugcagaagagggaggcaa

SEQ ID NO: 14360 - RNA, 22 nt, Artificial Sequence
  SAMD9L targeting guide sequence portion
ggacugguggacugcagaagag

SEQ ID NO: 14361 - RNA, 22 nt, Artificial Sequence
  SAMD9L targeting guide sequence portion
ggagaaggaagcucucuaagau

SEQ ID NO: 14362 - RNA, 22 nt, Artificial Sequence
  SAMD9L targeting guide sequence portion
ggagauccuguuacuguaugga

SEQ ID NO: 14363 - RNA, 22 nt, Artificial Sequence
  SAMD9L targeting guide sequence portion
ggagcagggucagcagcagaca

SEQ ID NO: 14364 - RNA, 22 nt, Artificial Sequence
  SAMD9L targeting guide sequence portion
ggaggaaaaacuacuaaauauu

SEQ ID NO: 14365 - RNA, 22 nt, Artificial Sequence
  SAMD9L targeting guide sequence portion
ggaggcaacuguuuggagcagg

SEQ ID NO: 14366 - RNA, 22 nt, Artificial Sequence
  SAMD9L targeting guide sequence portion
ggaguauagccacuugggagau

SEQ ID NO: 14367 - RNA, 22 nt, Artificial Sequence
  SAMD9L targeting guide sequence portion
ggaguccagaauaucuaaguua

SEQ ID NO: 14368 - RNA, 22 nt, Artificial Sequence
  SAMD9L targeting guide sequence portion
ggaguuuaaaagaaauaggauc

SEQ ID NO: 14369 - RNA, 22 nt, Artificial Sequence
  SAMD9L targeting guide sequence portion
ggaucaggccuauguccccagg

SEQ ID NO: 14370 - RNA, 22 nt, Artificial Sequence
  SAMD9L targeting guide sequence portion
ggaucucccaaguggcuauacu

SEQ ID NO: 14371 - RNA, 22 nt, Artificial Sequence
  SAMD9L targeting guide sequence portion
ggcaacgcucacaugguccaga

SEQ ID NO: 14372 - RNA, 22 nt, Artificial Sequence
  SAMD9L targeting guide sequence portion
ggcaacuguuuggagcaggguc

SEQ ID NO: 14373 - RNA, 22 nt, Artificial Sequence
  SAMD9L targeting guide sequence portion
ggccagaagaacccugauagag

SEQ ID NO: 14374 - RNA, 22 nt, Artificial Sequence
  SAMD9L targeting guide sequence portion
ggccuauauuucuaugaaucug

SEQ ID NO: 14375 - RNA, 22 nt, Artificial Sequence
  SAMD9L targeting guide sequence portion
ggccuaugaacaacuuggggag

SEQ ID NO: 14376 - RNA, 22 nt, Artificial Sequence
  SAMD9L targeting guide sequence portion
ggccuauguccccaggccuaug

SEQ ID NO: 14377 - RNA, 22 nt, Artificial Sequence
  SAMD9L targeting guide sequence portion
ggccugauccuauuucuuuuaa

SEQ ID NO: 14378 - RNA, 22 nt, Artificial Sequence
  SAMD9L targeting guide sequence portion
ggccuggggacauaggccugau

SEQ ID NO: 14379 - RNA, 22 nt, Artificial Sequence
  SAMD9L targeting guide sequence portion
ggcuaaggagaaggaagcucuc

SEQ ID NO: 14380 - RNA, 22 nt, Artificial Sequence
  SAMD9L targeting guide sequence portion
ggcuauacuccccaaguuguuc

SEQ ID NO: 14381 - RNA, 22 nt, Artificial Sequence
  SAMD9L targeting guide sequence portion
ggcuguugaaaugggggcuaag

SEQ ID NO: 14382 - RNA, 22 nt, Artificial Sequence
  SAMD9L targeting guide sequence portion
ggcuugauguagagaaaaaagu

SEQ ID NO: 14383 - RNA, 22 nt, Artificial Sequence
  SAMD9L targeting guide sequence portion
gggacauaggccugauccuauu

SEQ ID NO: 14384 - RNA, 22 nt, Artificial Sequence
  SAMD9L targeting guide sequence portion
gggacauguucuggaccaugug

SEQ ID NO: 14385 - RNA, 22 nt, Artificial Sequence
  SAMD9L targeting guide sequence portion
gggagauccuguuacuguaugg

SEQ ID NO: 14386 - RNA, 22 nt, Artificial Sequence
  SAMD9L targeting guide sequence portion
gggaggcaacuguuuggagcag

SEQ ID NO: 14387 - RNA, 22 nt, Artificial Sequence
  SAMD9L targeting guide sequence portion
gggaguauagccacuugggaga

SEQ ID NO: 14388 - RNA, 22 nt, Artificial Sequence
  SAMD9L targeting guide sequence portion
gggaguuuaaaagaaauaggau

SEQ ID NO: 14389 - RNA, 22 nt, Artificial Sequence
  SAMD9L targeting guide sequence portion
gggcaacgcucacaugguccag

SEQ ID NO: 14390 - RNA, 22 nt, Artificial Sequence
  SAMD9L targeting guide sequence portion
gggcuaaggagaaggaagcucu

SEQ ID NO: 14391 - RNA, 22 nt, Artificial Sequence
  SAMD9L targeting guide sequence portion
ggggacauaggccugauccuau

SEQ ID NO: 14392 - RNA, 22 nt, Artificial Sequence
  SAMD9L targeting guide sequence portion
ggggaguauagccacuugggag

SEQ ID NO: 14393 - RNA, 22 nt, Artificial Sequence
  SAMD9L targeting guide sequence portion
ggggaguuuaaaagaaauagga

SEQ ID NO: 14394 - RNA, 22 nt, Artificial Sequence
  SAMD9L targeting guide sequence portion
ggggcuaaggagaaggaagcuc

SEQ ID NO: 14395 - RNA, 22 nt, Artificial Sequence
  SAMD9L targeting guide sequence portion
gggggcuaaggagaaggaagcu

SEQ ID NO: 14396 - RNA, 22 nt, Artificial Sequence
  SAMD9L targeting guide sequence portion
ggggucagaauuauuaacucua

SEQ ID NO: 14397 - RNA, 22 nt, Artificial Sequence
  SAMD9L targeting guide sequence portion
gggucagaauuauuaacucuaa

SEQ ID NO: 14398 - RNA, 22 nt, Artificial Sequence
  SAMD9L targeting guide sequence portion
gggucagcagcagacacagcuu

SEQ ID NO: 14399 - RNA, 22 nt, Artificial Sequence
  SAMD9L targeting guide sequence portion
ggguucuucuggccuauauuuc

SEQ ID NO: 14400 - RNA, 22 nt, Artificial Sequence
  SAMD9L targeting guide sequence portion
ggguuuggaguccagaauaucu

SEQ ID NO: 14401 - RNA, 22 nt, Artificial Sequence
  SAMD9L targeting guide sequence portion
gguaucuuagagagcuuccuuc

SEQ ID NO: 14402 - RNA, 22 nt, Artificial Sequence
  SAMD9L targeting guide sequence portion
ggucagaauuauuaacucuaaa

SEQ ID NO: 14403 - RNA, 22 nt, Artificial Sequence
  SAMD9L targeting guide sequence portion
ggucagcagcagacacagcuuu

SEQ ID NO: 14404 - RNA, 22 nt, Artificial Sequence
  SAMD9L targeting guide sequence portion
gguccagaacaugucccucuuu

SEQ ID NO: 14405 - RNA, 22 nt, Artificial Sequence
  SAMD9L targeting guide sequence portion
gguggacugcagaagagggagg

SEQ ID NO: 14406 - RNA, 22 nt, Artificial Sequence
  SAMD9L targeting guide sequence portion
gguggggucagaauuauuaacu

SEQ ID NO: 14407 - RNA, 22 nt, Artificial Sequence
  SAMD9L targeting guide sequence portion
ggugguggggucagaauuauua

SEQ ID NO: 14408 - RNA, 22 nt, Artificial Sequence
  SAMD9L targeting guide sequence portion
gguuagcaggaauauuuaguag

SEQ ID NO: 14409 - RNA, 22 nt, Artificial Sequence
  SAMD9L targeting guide sequence portion
gguucuucuggccuauauuucu

SEQ ID NO: 14410 - RNA, 22 nt, Artificial Sequence
  SAMD9L targeting guide sequence portion
gguuuggaguccagaauaucua

SEQ ID NO: 14411 - RNA, 22 nt, Artificial Sequence
  SAMD9L targeting guide sequence portion
guaacaggaucucccaaguggc

SEQ ID NO: 14412 - RNA, 22 nt, Artificial Sequence
  SAMD9L targeting guide sequence portion
guaacuuagauauucuggacuc

SEQ ID NO: 14413 - RNA, 22 nt, Artificial Sequence
  SAMD9L targeting guide sequence portion
guaagacauaacuaaaggcuug

SEQ ID NO: 14414 - RNA, 22 nt, Artificial Sequence
  SAMD9L targeting guide sequence portion
guaauguaacuuagauauucug

SEQ ID NO: 14415 - RNA, 22 nt, Artificial Sequence
  SAMD9L targeting guide sequence portion
guagagaaaaaaguuauaauga

SEQ ID NO: 14416 - RNA, 22 nt, Artificial Sequence
  SAMD9L targeting guide sequence portion
guaguuuuuccuccuuucauua

SEQ ID NO: 14417 - RNA, 22 nt, Artificial Sequence
  SAMD9L targeting guide sequence portion
guauagccacuugggagauccu

SEQ ID NO: 14418 - RNA, 22 nt, Artificial Sequence
  SAMD9L targeting guide sequence portion
guaucucuuuguaauguaacuu

SEQ ID NO: 14419 - RNA, 22 nt, Artificial Sequence
  SAMD9L targeting guide sequence portion
guaucuuagagagcuuccuucu

SEQ ID NO: 14420 - RNA, 22 nt, Artificial Sequence
  SAMD9L targeting guide sequence portion
guauggacugguggacugcaga

SEQ ID NO: 14421 - RNA, 22 nt, Artificial Sequence
  SAMD9L targeting guide sequence portion
gucagaauuauuaacucuaaag

SEQ ID NO: 14422 - RNA, 22 nt, Artificial Sequence
  SAMD9L targeting guide sequence portion
gucagcagcagacacagcuuuc

SEQ ID NO: 14423 - RNA, 22 nt, Artificial Sequence
  SAMD9L targeting guide sequence portion
gucaucaagaagucuaugcucu

SEQ ID NO: 14424 - RNA, 22 nt, Artificial Sequence
  SAMD9L targeting guide sequence portion
guccaccaguccauacaguaac

SEQ ID NO: 14425 - RNA, 22 nt, Artificial Sequence
  SAMD9L targeting guide sequence portion
guccagaacaugucccucuuuc

SEQ ID NO: 14426 - RNA, 22 nt, Artificial Sequence
  SAMD9L targeting guide sequence portion
guccagaauaucuaaguuacau

SEQ ID NO: 14427 - RNA, 22 nt, Artificial Sequence
  SAMD9L targeting guide sequence portion
guccagcaggggaguuuaaaag

SEQ ID NO: 14428 - RNA, 22 nt, Artificial Sequence
  SAMD9L targeting guide sequence portion
guccauacaguaacaggaucuc

SEQ ID NO: 14429 - RNA, 22 nt, Artificial Sequence
  SAMD9L targeting guide sequence portion
guccccaggccuaugaacaacu

SEQ ID NO: 14430 - RNA, 22 nt, Artificial Sequence
  SAMD9L targeting guide sequence portion
gucccucuuucugaaagcugug

SEQ ID NO: 14431 - RNA, 22 nt, Artificial Sequence
  SAMD9L targeting guide sequence portion
gucuaugcucuaucaggguucu

SEQ ID NO: 14432 - RNA, 22 nt, Artificial Sequence
  SAMD9L targeting guide sequence portion
gucugcugcugacccugcucca

SEQ ID NO: 14433 - RNA, 22 nt, Artificial Sequence
  SAMD9L targeting guide sequence portion
gucuuacuaaauguuauagucc

SEQ ID NO: 14434 - RNA, 22 nt, Artificial Sequence
  SAMD9L targeting guide sequence portion
gugagcguugcccagauucaua

SEQ ID NO: 14435 - RNA, 22 nt, Artificial Sequence
  SAMD9L targeting guide sequence portion
guggacugcagaagagggaggc

SEQ ID NO: 14436 - RNA, 22 nt, Artificial Sequence
  SAMD9L targeting guide sequence portion
guggcuauacuccccaaguugu

SEQ ID NO: 14437 - RNA, 22 nt, Artificial Sequence
  SAMD9L targeting guide sequence portion
guggggucagaauuauuaacuc

SEQ ID NO: 14438 - RNA, 22 nt, Artificial Sequence
  SAMD9L targeting guide sequence portion
gugguggggucagaauuauuaa

SEQ ID NO: 14439 - RNA, 22 nt, Artificial Sequence
  SAMD9L targeting guide sequence portion
gugucugcugcugacccugcuc

SEQ ID NO: 14440 - RNA, 22 nt, Artificial Sequence
  SAMD9L targeting guide sequence portion
guuaauaauucugaccccacca

SEQ ID NO: 14441 - RNA, 22 nt, Artificial Sequence
  SAMD9L targeting guide sequence portion
guuacauuacaaagagauacaa

SEQ ID NO: 14442 - RNA, 22 nt, Artificial Sequence
  SAMD9L targeting guide sequence portion
guuacuguauggacugguggac

SEQ ID NO: 14443 - RNA, 22 nt, Artificial Sequence
  SAMD9L targeting guide sequence portion
guuagcaggaauauuuaguagu

SEQ ID NO: 14444 - RNA, 22 nt, Artificial Sequence
  SAMD9L targeting guide sequence portion
guuauaaugaaaggaggaaaaa

SEQ ID NO: 14445 - RNA, 22 nt, Artificial Sequence
  SAMD9L targeting guide sequence portion
guuauaguccagcaggggaguu

SEQ ID NO: 14446 - RNA, 22 nt, Artificial Sequence
  SAMD9L targeting guide sequence portion
guuaugucuuacuaaauguuau

SEQ ID NO: 14447 - RNA, 22 nt, Artificial Sequence
  SAMD9L targeting guide sequence portion
guucauaggccuggggacauag

SEQ ID NO: 14448 - RNA, 22 nt, Artificial Sequence
  SAMD9L targeting guide sequence portion
guucuggaccaugugagcguug

SEQ ID NO: 14449 - RNA, 22 nt, Artificial Sequence
  SAMD9L targeting guide sequence portion
guucuucuggccuauauuucua

SEQ ID NO: 14450 - RNA, 22 nt, Artificial Sequence
  SAMD9L targeting guide sequence portion
guugaaaugggggcuaaggaga

SEQ ID NO: 14451 - RNA, 22 nt, Artificial Sequence
  SAMD9L targeting guide sequence portion
guugcccagauucauagaaaua

SEQ ID NO: 14452 - RNA, 22 nt, Artificial Sequence
  SAMD9L targeting guide sequence portion
guugccucccucuucugcaguc

SEQ ID NO: 14453 - RNA, 22 nt, Artificial Sequence
  SAMD9L targeting guide sequence portion
guuguucauaggccuggggaca

SEQ ID NO: 14454 - RNA, 22 nt, Artificial Sequence
  SAMD9L targeting guide sequence portion
guuuaaaagaaauaggaucagg

SEQ ID NO: 14455 - RNA, 22 nt, Artificial Sequence
  SAMD9L targeting guide sequence portion
guuuggagcagggucagcagca

SEQ ID NO: 14456 - RNA, 22 nt, Artificial Sequence
  SAMD9L targeting guide sequence portion
guuuggaguccagaauaucuaa

SEQ ID NO: 14457 - RNA, 22 nt, Artificial Sequence
  SAMD9L targeting guide sequence portion
guuuuuccuccuuucauuauaa

SEQ ID NO: 14458 - RNA, 22 nt, Artificial Sequence
  SAMD9L targeting guide sequence portion
uaaaagaaauaggaucaggccu

SEQ ID NO: 14459 - RNA, 22 nt, Artificial Sequence
  SAMD9L targeting guide sequence portion
uaaacuccccugcuggacuaua

SEQ ID NO: 14460 - RNA, 22 nt, Artificial Sequence
  SAMD9L targeting guide sequence portion
uaaagauaauuaugguuagcag

SEQ ID NO: 14461 - RNA, 22 nt, Artificial Sequence
  SAMD9L targeting guide sequence portion
uaaaggcuugauguagagaaaa

SEQ ID NO: 14462 - RNA, 22 nt, Artificial Sequence
  SAMD9L targeting guide sequence portion
uaaauauuccugcuaaccauaa

SEQ ID NO: 14463 - RNA, 22 nt, Artificial Sequence
  SAMD9L targeting guide sequence portion
uaaauguuauaguccagcaggg

SEQ ID NO: 14464 - RNA, 22 nt, Artificial Sequence
  SAMD9L targeting guide sequence portion
uaacaggaucucccaaguggcu

SEQ ID NO: 14465 - RNA, 22 nt, Artificial Sequence
  SAMD9L targeting guide sequence portion
uaacauuuaguaagacauaacu

SEQ ID NO: 14466 - RNA, 22 nt, Artificial Sequence
  SAMD9L targeting guide sequence portion
uaaccauaauuaucuuuagagu

SEQ ID NO: 14467 - RNA, 22 nt, Artificial Sequence
  SAMD9L targeting guide sequence portion
uaacuaaaggcuugauguagag

SEQ ID NO: 14468 - RNA, 22 nt, Artificial Sequence
  SAMD9L targeting guide sequence portion
uaacucuaaagauaauuauggu

SEQ ID NO: 14469 - RNA, 22 nt, Artificial Sequence
  SAMD9L targeting guide sequence portion
uaacuuagauauucuggacucc

SEQ ID NO: 14470 - RNA, 22 nt, Artificial Sequence
  SAMD9L targeting guide sequence portion
uaacuuuuuucucuacaucaag

SEQ ID NO: 14471 - RNA, 22 nt, Artificial Sequence
  SAMD9L targeting guide sequence portion
uaagacauaacuaaaggcuuga

SEQ ID NO: 14472 - RNA, 22 nt, Artificial Sequence
  SAMD9L targeting guide sequence portion
uaagauaccugguggugggguc

SEQ ID NO: 14473 - RNA, 22 nt, Artificial Sequence
  SAMD9L targeting guide sequence portion
uaaggagaaggaagcucucuaa

SEQ ID NO: 14474 - RNA, 22 nt, Artificial Sequence
  SAMD9L targeting guide sequence portion
uaaguuacauuacaaagagaua

SEQ ID NO: 14475 - RNA, 22 nt, Artificial Sequence
  SAMD9L targeting guide sequence portion
uaauaauucugaccccaccacc

SEQ ID NO: 14476 - RNA, 22 nt, Artificial Sequence
  SAMD9L targeting guide sequence portion
uaaugaaaggaggaaaaacuac

SEQ ID NO: 14477 - RNA, 22 nt, Artificial Sequence
  SAMD9L targeting guide sequence portion
uaauguaacuuagauauucugg

SEQ ID NO: 14478 - RNA, 22 nt, Artificial Sequence
  SAMD9L targeting guide sequence portion
uaauuaucuuuagaguuaauaa

SEQ ID NO: 14479 - RNA, 22 nt, Artificial Sequence
  SAMD9L targeting guide sequence portion
uaauuaugguuagcaggaauau

SEQ ID NO: 14480 - RNA, 22 nt, Artificial Sequence
  SAMD9L targeting guide sequence portion
uaauucugaccccaccaccagg

SEQ ID NO: 14481 - RNA, 22 nt, Artificial Sequence
  SAMD9L targeting guide sequence portion
uacaguaacaggaucucccaag

SEQ ID NO: 14482 - RNA, 22 nt, Artificial Sequence
  SAMD9L targeting guide sequence portion
uacaucaagccuuuaguuaugu

SEQ ID NO: 14483 - RNA, 22 nt, Artificial Sequence
  SAMD9L targeting guide sequence portion
uaccuggugguggggucagaau

SEQ ID NO: 14484 - RNA, 22 nt, Artificial Sequence
  SAMD9L targeting guide sequence portion
uacuaaauauuccugcuaacca

SEQ ID NO: 14485 - RNA, 22 nt, Artificial Sequence
  SAMD9L targeting guide sequence portion
uacuaaauguuauaguccagca

SEQ ID NO: 14486 - RNA, 22 nt, Artificial Sequence
  SAMD9L targeting guide sequence portion
uacuccccaaguuguucauagg

SEQ ID NO: 14487 - RNA, 22 nt, Artificial Sequence
  SAMD9L targeting guide sequence portion
uacuguauggacugguggacug

SEQ ID NO: 14488 - RNA, 22 nt, Artificial Sequence
  SAMD9L targeting guide sequence portion
uagaaauauaggccagaagaac

SEQ ID NO: 14489 - RNA, 22 nt, Artificial Sequence
  SAMD9L targeting guide sequence portion
uagacuucuugaugacaagaag

SEQ ID NO: 14490 - RNA, 22 nt, Artificial Sequence
  SAMD9L targeting guide sequence portion
uagagaaaaaaguuauaaugaa

SEQ ID NO: 14491 - RNA, 22 nt, Artificial Sequence
  SAMD9L targeting guide sequence portion
uagagagcuuccuucuccuuag

SEQ ID NO: 14492 - RNA, 22 nt, Artificial Sequence
  SAMD9L targeting guide sequence portion
uagagcauagacuucuugauga

SEQ ID NO: 14493 - RNA, 22 nt, Artificial Sequence
  SAMD9L targeting guide sequence portion
uagaguuaauaauucugacccc

SEQ ID NO: 14494 - RNA, 22 nt, Artificial Sequence
  SAMD9L targeting guide sequence portion
uagauauucuggacuccaaacc

SEQ ID NO: 14495 - RNA, 22 nt, Artificial Sequence
  SAMD9L targeting guide sequence portion
uagcaggaauauuuaguaguuu

SEQ ID NO: 14496 - RNA, 22 nt, Artificial Sequence
  SAMD9L targeting guide sequence portion
uagccacuugggagauccuguu

SEQ ID NO: 14497 - RNA, 22 nt, Artificial Sequence
  SAMD9L targeting guide sequence portion
uaggaucaggccuaugucccca

SEQ ID NO: 14498 - RNA, 22 nt, Artificial Sequence
  SAMD9L targeting guide sequence portion
uaggccagaagaacccugauag

SEQ ID NO: 14499 - RNA, 22 nt, Artificial Sequence
  SAMD9L targeting guide sequence portion
uaggccugauccuauuucuuuu

SEQ ID NO: 14500 - RNA, 22 nt, Artificial Sequence
  SAMD9L targeting guide sequence portion
uaggccuggggacauaggccug

SEQ ID NO: 14501 - RNA, 22 nt, Artificial Sequence
  SAMD9L targeting guide sequence portion
uaguaagacauaacuaaaggcu

SEQ ID NO: 14502 - RNA, 22 nt, Artificial Sequence
  SAMD9L targeting guide sequence portion
uaguaguuuuuccuccuuucau

SEQ ID NO: 14503 - RNA, 22 nt, Artificial Sequence
  SAMD9L targeting guide sequence portion
uaguccagcaggggaguuuaaa

SEQ ID NO: 14504 - RNA, 22 nt, Artificial Sequence
  SAMD9L targeting guide sequence portion
uaguuaugucuuacuaaauguu

SEQ ID NO: 14505 - RNA, 22 nt, Artificial Sequence
  SAMD9L targeting guide sequence portion
uaguuuuuccuccuuucauuau

SEQ ID NO: 14506 - RNA, 22 nt, Artificial Sequence
  SAMD9L targeting guide sequence portion
uauaacauuuaguaagacauaa

SEQ ID NO: 14507 - RNA, 22 nt, Artificial Sequence
  SAMD9L targeting guide sequence portion
uauaacuuuuuucucuacauca

SEQ ID NO: 14508 - RNA, 22 nt, Artificial Sequence
  SAMD9L targeting guide sequence portion
uauaaugaaaggaggaaaaacu

SEQ ID NO: 14509 - RNA, 22 nt, Artificial Sequence
  SAMD9L targeting guide sequence portion
uauacuccccaaguuguucaua

SEQ ID NO: 14510 - RNA, 22 nt, Artificial Sequence
  SAMD9L targeting guide sequence portion
uauagccacuugggagauccug

SEQ ID NO: 14511 - RNA, 22 nt, Artificial Sequence
  SAMD9L targeting guide sequence portion
uauaggccagaagaacccugau

SEQ ID NO: 14512 - RNA, 22 nt, Artificial Sequence
  SAMD9L targeting guide sequence portion
uauaguccagcaggggaguuua

SEQ ID NO: 14513 - RNA, 22 nt, Artificial Sequence
  SAMD9L targeting guide sequence portion
uauauuucuaugaaucugggca

SEQ ID NO: 14514 - RNA, 22 nt, Artificial Sequence
  SAMD9L targeting guide sequence portion
uaucaggguucuucuggccuau

SEQ ID NO: 14515 - RNA, 22 nt, Artificial Sequence
  SAMD9L targeting guide sequence portion
uaucuaaguuacauuacaaaga

SEQ ID NO: 14516 - RNA, 22 nt, Artificial Sequence
  SAMD9L targeting guide sequence portion
uaucucuuuguaauguaacuua

SEQ ID NO: 14517 - RNA, 22 nt, Artificial Sequence
  SAMD9L targeting guide sequence portion
uaucuuagagagcuuccuucuc

SEQ ID NO: 14518 - RNA, 22 nt, Artificial Sequence
  SAMD9L targeting guide sequence portion
uaucuuuagaguuaauaauucu

SEQ ID NO: 14519 - RNA, 22 nt, Artificial Sequence
  SAMD9L targeting guide sequence portion
uaugaacaacuuggggaguaua

SEQ ID NO: 14520 - RNA, 22 nt, Artificial Sequence
  SAMD9L targeting guide sequence portion
uaugaaucugggcaacgcucac

SEQ ID NO: 14521 - RNA, 22 nt, Artificial Sequence
  SAMD9L targeting guide sequence portion
uaugcucuaucaggguucuucu

SEQ ID NO: 14522 - RNA, 22 nt, Artificial Sequence
  SAMD9L targeting guide sequence portion
uauggacugguggacugcagaa

SEQ ID NO: 14523 - RNA, 22 nt, Artificial Sequence
  SAMD9L targeting guide sequence portion
uaugguuagcaggaauauuuag

SEQ ID NO: 14524 - RNA, 22 nt, Artificial Sequence
  SAMD9L targeting guide sequence portion
uauguccccaggccuaugaaca

SEQ ID NO: 14525 - RNA, 22 nt, Artificial Sequence
  SAMD9L targeting guide sequence portion
uaugucuuacuaaauguuauag

SEQ ID NO: 14526 - RNA, 22 nt, Artificial Sequence
  SAMD9L targeting guide sequence portion
uauuaacucuaaagauaauuau

SEQ ID NO: 14527 - RNA, 22 nt, Artificial Sequence
  SAMD9L targeting guide sequence portion
uauuccugcuaaccauaauuau

SEQ ID NO: 14528 - RNA, 22 nt, Artificial Sequence
  SAMD9L targeting guide sequence portion
uauucuggacuccaaacccaau

SEQ ID NO: 14529 - RNA, 22 nt, Artificial Sequence
  SAMD9L targeting guide sequence portion
uauuuaguaguuuuuccuccuu

SEQ ID NO: 14530 - RNA, 22 nt, Artificial Sequence
  SAMD9L targeting guide sequence portion
uauuucuaugaaucugggcaac

SEQ ID NO: 14531 - RNA, 22 nt, Artificial Sequence
  SAMD9L targeting guide sequence portion
uauuucuuuuaaacuccccugc

SEQ ID NO: 14532 - RNA, 22 nt, Artificial Sequence
  SAMD9L targeting guide sequence portion
ucaagaagucuaugcucuauca

SEQ ID NO: 14533 - RNA, 22 nt, Artificial Sequence
  SAMD9L targeting guide sequence portion
ucaagccuuuaguuaugucuua

SEQ ID NO: 14534 - RNA, 22 nt, Artificial Sequence
  SAMD9L targeting guide sequence portion
ucacaugguccagaacaugucc

SEQ ID NO: 14535 - RNA, 22 nt, Artificial Sequence
  SAMD9L targeting guide sequence portion
ucagaaagagggacauguucug

SEQ ID NO: 14536 - RNA, 22 nt, Artificial Sequence
  SAMD9L targeting guide sequence portion
ucagaauuauuaacucuaaaga

SEQ ID NO: 14537 - RNA, 22 nt, Artificial Sequence
  SAMD9L targeting guide sequence portion
ucagcagcagacacagcuuuca

SEQ ID NO: 14538 - RNA, 22 nt, Artificial Sequence
  SAMD9L targeting guide sequence portion
ucaggccuauguccccaggccu

SEQ ID NO: 14539 - RNA, 22 nt, Artificial Sequence
  SAMD9L targeting guide sequence portion
ucaggguucuucuggccuauau

SEQ ID NO: 14540 - RNA, 22 nt, Artificial Sequence
  SAMD9L targeting guide sequence portion
ucauagaaauauaggccagaag

SEQ ID NO: 14541 - RNA, 22 nt, Artificial Sequence
  SAMD9L targeting guide sequence portion
ucauaggccuggggacauaggc

SEQ ID NO: 14542 - RNA, 22 nt, Artificial Sequence
  SAMD9L targeting guide sequence portion
ucaucaagaagucuaugcucua

SEQ ID NO: 14543 - RNA, 22 nt, Artificial Sequence
  SAMD9L targeting guide sequence portion
ucauuauaacuuuuuucucuac

SEQ ID NO: 14544 - RNA, 22 nt, Artificial Sequence
  SAMD9L targeting guide sequence portion
uccaaacaguugccucccucuu

SEQ ID NO: 14545 - RNA, 22 nt, Artificial Sequence
  SAMD9L targeting guide sequence portion
uccaaacccaauucuucuuguc

SEQ ID NO: 14546 - RNA, 22 nt, Artificial Sequence
  SAMD9L targeting guide sequence portion
uccaccaguccauacaguaaca

SEQ ID NO: 14547 - RNA, 22 nt, Artificial Sequence
  SAMD9L targeting guide sequence portion
uccagaacaugucccucuuucu

SEQ ID NO: 14548 - RNA, 22 nt, Artificial Sequence
  SAMD9L targeting guide sequence portion
uccagaauaucuaaguuacauu

SEQ ID NO: 14549 - RNA, 22 nt, Artificial Sequence
  SAMD9L targeting guide sequence portion
uccagcaggggaguuuaaaaga

SEQ ID NO: 14550 - RNA, 22 nt, Artificial Sequence
  SAMD9L targeting guide sequence portion
uccauacaguaacaggaucucc

SEQ ID NO: 14551 - RNA, 22 nt, Artificial Sequence
  SAMD9L targeting guide sequence portion
ucccaaguggcuauacucccca

SEQ ID NO: 14552 - RNA, 22 nt, Artificial Sequence
  SAMD9L targeting guide sequence portion
uccccaaguuguucauaggccu

SEQ ID NO: 14553 - RNA, 22 nt, Artificial Sequence
  SAMD9L targeting guide sequence portion
uccccaggccuaugaacaacuu

SEQ ID NO: 14554 - RNA, 22 nt, Artificial Sequence
  SAMD9L targeting guide sequence portion
uccccugcuggacuauaacauu

SEQ ID NO: 14555 - RNA, 22 nt, Artificial Sequence
  SAMD9L targeting guide sequence portion
ucccucuucugcaguccaccag

SEQ ID NO: 14556 - RNA, 22 nt, Artificial Sequence
  SAMD9L targeting guide sequence portion
ucccucuuucugaaagcugugu

SEQ ID NO: 14557 - RNA, 22 nt, Artificial Sequence
  SAMD9L targeting guide sequence portion
uccuauuucuuuuaaacucccc

SEQ ID NO: 14558 - RNA, 22 nt, Artificial Sequence
  SAMD9L targeting guide sequence portion
uccuccuuucauuauaacuuuu

SEQ ID NO: 14559 - RNA, 22 nt, Artificial Sequence
  SAMD9L targeting guide sequence portion
uccugcuaaccauaauuaucuu

SEQ ID NO: 14560 - RNA, 22 nt, Artificial Sequence
  SAMD9L targeting guide sequence portion
uccuguuacuguauggacuggu

SEQ ID NO: 14561 - RNA, 22 nt, Artificial Sequence
  SAMD9L targeting guide sequence portion
uccuucuccuuagcccccauuu

SEQ ID NO: 14562 - RNA, 22 nt, Artificial Sequence
  SAMD9L targeting guide sequence portion
uccuuucauuauaacuuuuuuc

SEQ ID NO: 14563 - RNA, 22 nt, Artificial Sequence
  SAMD9L targeting guide sequence portion
ucuaaagauaauuaugguuagc

SEQ ID NO: 14564 - RNA, 22 nt, Artificial Sequence
  SAMD9L targeting guide sequence portion
ucuaagauaccugguggugggg

SEQ ID NO: 14565 - RNA, 22 nt, Artificial Sequence
  SAMD9L targeting guide sequence portion
ucuaaguuacauuacaaagaga

SEQ ID NO: 14566 - RNA, 22 nt, Artificial Sequence
  SAMD9L targeting guide sequence portion
ucuacaucaagccuuuaguuau

SEQ ID NO: 14567 - RNA, 22 nt, Artificial Sequence
  SAMD9L targeting guide sequence portion
ucuaucaggguucuucuggccu

SEQ ID NO: 14568 - RNA, 22 nt, Artificial Sequence
  SAMD9L targeting guide sequence portion
ucuaugaaucugggcaacgcuc

SEQ ID NO: 14569 - RNA, 22 nt, Artificial Sequence
  SAMD9L targeting guide sequence portion
ucuaugcucuaucaggguucuu

SEQ ID NO: 14570 - RNA, 22 nt, Artificial Sequence
  SAMD9L targeting guide sequence portion
ucucccaaguggcuauacuccc

SEQ ID NO: 14571 - RNA, 22 nt, Artificial Sequence
  SAMD9L targeting guide sequence portion
ucucuaagauaccugguggugg

SEQ ID NO: 14572 - RNA, 22 nt, Artificial Sequence
  SAMD9L targeting guide sequence portion
ucucuacaucaagccuuuaguu

SEQ ID NO: 14573 - RNA, 22 nt, Artificial Sequence
  SAMD9L targeting guide sequence portion
ucucuuuguaauguaacuuaga

SEQ ID NO: 14574 - RNA, 22 nt, Artificial Sequence
  SAMD9L targeting guide sequence portion
ucugaaagcugugucugcugcu

SEQ ID NO: 14575 - RNA, 22 nt, Artificial Sequence
  SAMD9L targeting guide sequence portion
ucugaccccaccaccagguauc

SEQ ID NO: 14576 - RNA, 22 nt, Artificial Sequence
  SAMD9L targeting guide sequence portion
ucugcaguccaccaguccauac

SEQ ID NO: 14577 - RNA, 22 nt, Artificial Sequence
  SAMD9L targeting guide sequence portion
ucugcugcugacccugcuccaa

SEQ ID NO: 14578 - RNA, 22 nt, Artificial Sequence
  SAMD9L targeting guide sequence portion
ucuggaccaugugagcguugcc

SEQ ID NO: 14579 - RNA, 22 nt, Artificial Sequence
  SAMD9L targeting guide sequence portion
ucuggacuccaaacccaauucu

SEQ ID NO: 14580 - RNA, 22 nt, Artificial Sequence
  SAMD9L targeting guide sequence portion
ucuggccuauauuucuaugaau

SEQ ID NO: 14581 - RNA, 22 nt, Artificial Sequence
  SAMD9L targeting guide sequence portion
ucugggcaacgcucacaugguc

SEQ ID NO: 14582 - RNA, 22 nt, Artificial Sequence
  SAMD9L targeting guide sequence portion
ucuuacuaaauguuauagucca

SEQ ID NO: 14583 - RNA, 22 nt, Artificial Sequence
  SAMD9L targeting guide sequence portion
ucuuagagagcuuccuucuccu

SEQ ID NO: 14584 - RNA, 22 nt, Artificial Sequence
  SAMD9L targeting guide sequence portion
ucuucugcaguccaccagucca

SEQ ID NO: 14585 - RNA, 22 nt, Artificial Sequence
  SAMD9L targeting guide sequence portion
ucuucuggccuauauuucuaug

SEQ ID NO: 14586 - RNA, 22 nt, Artificial Sequence
  SAMD9L targeting guide sequence portion
ucuucuugucaucaagaagucu

SEQ ID NO: 14587 - RNA, 22 nt, Artificial Sequence
  SAMD9L targeting guide sequence portion
ucuugaugacaagaagaauugg

SEQ ID NO: 14588 - RNA, 22 nt, Artificial Sequence
  SAMD9L targeting guide sequence portion
ucuugucaucaagaagucuaug

SEQ ID NO: 14589 - RNA, 22 nt, Artificial Sequence
  SAMD9L targeting guide sequence portion
ucuuuagaguuaauaauucuga

SEQ ID NO: 14590 - RNA, 22 nt, Artificial Sequence
  SAMD9L targeting guide sequence portion
ucuuucugaaagcugugucugc

SEQ ID NO: 14591 - RNA, 22 nt, Artificial Sequence
  SAMD9L targeting guide sequence portion
ucuuuguaauguaacuuagaua

SEQ ID NO: 14592 - RNA, 22 nt, Artificial Sequence
  SAMD9L targeting guide sequence portion
ucuuuguaucucuuuguaaugu

SEQ ID NO: 14593 - RNA, 22 nt, Artificial Sequence
  SAMD9L targeting guide sequence portion
ucuuuuaaacuccccugcugga

SEQ ID NO: 14594 - RNA, 22 nt, Artificial Sequence
  SAMD9L targeting guide sequence portion
ugaaagcugugucugcugcuga

SEQ ID NO: 14595 - RNA, 22 nt, Artificial Sequence
  SAMD9L targeting guide sequence portion
ugaaaggaggaaaaacuacuaa

SEQ ID NO: 14596 - RNA, 22 nt, Artificial Sequence
  SAMD9L targeting guide sequence portion
ugaaaugggggcuaaggagaag

SEQ ID NO: 14597 - RNA, 22 nt, Artificial Sequence
  SAMD9L targeting guide sequence portion
ugaacaacuuggggaguauagc

SEQ ID NO: 14598 - RNA, 22 nt, Artificial Sequence
  SAMD9L targeting guide sequence portion
ugaaucugggcaacgcucacau

SEQ ID NO: 14599 - RNA, 22 nt, Artificial Sequence
  SAMD9L targeting guide sequence portion
ugacaagaagaauuggguuugg

SEQ ID NO: 14600 - RNA, 22 nt, Artificial Sequence
  SAMD9L targeting guide sequence portion
ugaccccaccaccagguaucuu

SEQ ID NO: 14601 - RNA, 22 nt, Artificial Sequence
  SAMD9L targeting guide sequence portion
ugacccugcuccaaacaguugc

SEQ ID NO: 14602 - RNA, 22 nt, Artificial Sequence
  SAMD9L targeting guide sequence portion
ugagcguugcccagauucauag

SEQ ID NO: 14603 - RNA, 22 nt, Artificial Sequence
  SAMD9L targeting guide sequence portion
ugauagagcauagacuucuuga

SEQ ID NO: 14604 - RNA, 22 nt, Artificial Sequence
  SAMD9L targeting guide sequence portion
ugauccuauuucuuuuaaacuc

SEQ ID NO: 14605 - RNA, 22 nt, Artificial Sequence
  SAMD9L targeting guide sequence portion
ugaugacaagaagaauuggguu

SEQ ID NO: 14606 - RNA, 22 nt, Artificial Sequence
  SAMD9L targeting guide sequence portion
ugauguagagaaaaaaguuaua

SEQ ID NO: 14607 - RNA, 22 nt, Artificial Sequence
  SAMD9L targeting guide sequence portion
ugcagaagagggaggcaacugu

SEQ ID NO: 14608 - RNA, 22 nt, Artificial Sequence
  SAMD9L targeting guide sequence portion
ugcaguccaccaguccauacag

SEQ ID NO: 14609 - RNA, 22 nt, Artificial Sequence
  SAMD9L targeting guide sequence portion
ugcccagauucauagaaauaua

SEQ ID NO: 14610 - RNA, 22 nt, Artificial Sequence
  SAMD9L targeting guide sequence portion
ugccucccucuucugcagucca

SEQ ID NO: 14611 - RNA, 22 nt, Artificial Sequence
  SAMD9L targeting guide sequence portion
ugcuaaccauaauuaucuuuag

SEQ ID NO: 14612 - RNA, 22 nt, Artificial Sequence
  SAMD9L targeting guide sequence portion
ugcuccaaacaguugccucccu

SEQ ID NO: 14613 - RNA, 22 nt, Artificial Sequence
  SAMD9L targeting guide sequence portion
ugcucuaucaggguucuucugg

SEQ ID NO: 14614 - RNA, 22 nt, Artificial Sequence
  SAMD9L targeting guide sequence portion
ugcugacccugcuccaaacagu

SEQ ID NO: 14615 - RNA, 22 nt, Artificial Sequence
  SAMD9L targeting guide sequence portion
ugcugcugacccugcuccaaac

SEQ ID NO: 14616 - RNA, 22 nt, Artificial Sequence
  SAMD9L targeting guide sequence portion
ugcuggacuauaacauuuagua

SEQ ID NO: 14617 - RNA, 22 nt, Artificial Sequence
  SAMD9L targeting guide sequence portion
uggaccaugugagcguugccca

SEQ ID NO: 14618 - RNA, 22 nt, Artificial Sequence
  SAMD9L targeting guide sequence portion
uggacuauaacauuuaguaaga

SEQ ID NO: 14619 - RNA, 22 nt, Artificial Sequence
  SAMD9L targeting guide sequence portion
uggacuccaaacccaauucuuc

SEQ ID NO: 14620 - RNA, 22 nt, Artificial Sequence
  SAMD9L targeting guide sequence portion
uggacugcagaagagggaggca

SEQ ID NO: 14621 - RNA, 22 nt, Artificial Sequence
  SAMD9L targeting guide sequence portion
uggacugguggacugcagaaga

SEQ ID NO: 14622 - RNA, 22 nt, Artificial Sequence
  SAMD9L targeting guide sequence portion
uggagcagggucagcagcagac

SEQ ID NO: 14623 - RNA, 22 nt, Artificial Sequence
  SAMD9L targeting guide sequence portion
uggaguccagaauaucuaaguu

SEQ ID NO: 14624 - RNA, 22 nt, Artificial Sequence
  SAMD9L targeting guide sequence portion
uggccuauauuucuaugaaucu

SEQ ID NO: 14625 - RNA, 22 nt, Artificial Sequence
  SAMD9L targeting guide sequence portion
uggcuauacuccccaaguuguu

SEQ ID NO: 14626 - RNA, 22 nt, Artificial Sequence
  SAMD9L targeting guide sequence portion
ugggagauccuguuacuguaug

SEQ ID NO: 14627 - RNA, 22 nt, Artificial Sequence
  SAMD9L targeting guide sequence portion
ugggcaacgcucacauggucca

SEQ ID NO: 14628 - RNA, 22 nt, Artificial Sequence
  SAMD9L targeting guide sequence portion
uggggacauaggccugauccua

SEQ ID NO: 14629 - RNA, 22 nt, Artificial Sequence
  SAMD9L targeting guide sequence portion
uggggaguauagccacuuggga

SEQ ID NO: 14630 - RNA, 22 nt, Artificial Sequence
  SAMD9L targeting guide sequence portion
ugggggcuaaggagaaggaagc

SEQ ID NO: 14631 - RNA, 22 nt, Artificial Sequence
  SAMD9L targeting guide sequence portion
uggggucagaauuauuaacucu

SEQ ID NO: 14632 - RNA, 22 nt, Artificial Sequence
  SAMD9L targeting guide sequence portion
uggguuuggaguccagaauauc

SEQ ID NO: 14633 - RNA, 22 nt, Artificial Sequence
  SAMD9L targeting guide sequence portion
ugguccagaacaugucccucuu

SEQ ID NO: 14634 - RNA, 22 nt, Artificial Sequence
  SAMD9L targeting guide sequence portion
ugguggacugcagaagagggag

SEQ ID NO: 14635 - RNA, 22 nt, Artificial Sequence
  SAMD9L targeting guide sequence portion
ugguggggucagaauuauuaac

SEQ ID NO: 14636 - RNA, 22 nt, Artificial Sequence
  SAMD9L targeting guide sequence portion
uggugguggggucagaauuauu

SEQ ID NO: 14637 - RNA, 22 nt, Artificial Sequence
  SAMD9L targeting guide sequence portion
ugguuagcaggaauauuuagua

SEQ ID NO: 14638 - RNA, 22 nt, Artificial Sequence
  SAMD9L targeting guide sequence portion
uguaacuuagauauucuggacu

SEQ ID NO: 14639 - RNA, 22 nt, Artificial Sequence
  SAMD9L targeting guide sequence portion
uguaauguaacuuagauauucu

SEQ ID NO: 14640 - RNA, 22 nt, Artificial Sequence
  SAMD9L targeting guide sequence portion
uguagagaaaaaaguuauaaug

SEQ ID NO: 14641 - RNA, 22 nt, Artificial Sequence
  SAMD9L targeting guide sequence portion
uguaucucuuuguaauguaacu

SEQ ID NO: 14642 - RNA, 22 nt, Artificial Sequence
  SAMD9L targeting guide sequence portion
uguauggacugguggacugcag

SEQ ID NO: 14643 - RNA, 22 nt, Artificial Sequence
  SAMD9L targeting guide sequence portion
ugucaucaagaagucuaugcuc

SEQ ID NO: 14644 - RNA, 22 nt, Artificial Sequence
  SAMD9L targeting guide sequence portion
uguccccaggccuaugaacaac

SEQ ID NO: 14645 - RNA, 22 nt, Artificial Sequence
  SAMD9L targeting guide sequence portion
ugucccucuuucugaaagcugu

SEQ ID NO: 14646 - RNA, 22 nt, Artificial Sequence
  SAMD9L targeting guide sequence portion
ugucugcugcugacccugcucc

SEQ ID NO: 14647 - RNA, 22 nt, Artificial Sequence
  SAMD9L targeting guide sequence portion
ugucuuacuaaauguuauaguc

SEQ ID NO: 14648 - RNA, 22 nt, Artificial Sequence
  SAMD9L targeting guide sequence portion
ugugagcguugcccagauucau

SEQ ID NO: 14649 - RNA, 22 nt, Artificial Sequence
  SAMD9L targeting guide sequence portion
ugugucugcugcugacccugcu

SEQ ID NO: 14650 - RNA, 22 nt, Artificial Sequence
  SAMD9L targeting guide sequence portion
uguuacuguauggacuggugga

SEQ ID NO: 14651 - RNA, 22 nt, Artificial Sequence
  SAMD9L targeting guide sequence portion
uguuauaguccagcaggggagu

SEQ ID NO: 14652 - RNA, 22 nt, Artificial Sequence
  SAMD9L targeting guide sequence portion
uguucauaggccuggggacaua

SEQ ID NO: 14653 - RNA, 22 nt, Artificial Sequence
  SAMD9L targeting guide sequence portion
uguucuggaccaugugagcguu

SEQ ID NO: 14654 - RNA, 22 nt, Artificial Sequence
  SAMD9L targeting guide sequence portion
uguugaaaugggggcuaaggag

SEQ ID NO: 14655 - RNA, 22 nt, Artificial Sequence
  SAMD9L targeting guide sequence portion
uguuuggagcagggucagcagc

SEQ ID NO: 14656 - RNA, 22 nt, Artificial Sequence
  SAMD9L targeting guide sequence portion
uuaaaagaaauaggaucaggcc

SEQ ID NO: 14657 - RNA, 22 nt, Artificial Sequence
  SAMD9L targeting guide sequence portion
uuaaacuccccugcuggacuau

SEQ ID NO: 14658 - RNA, 22 nt, Artificial Sequence
  SAMD9L targeting guide sequence portion
uuaacucuaaagauaauuaugg

SEQ ID NO: 14659 - RNA, 22 nt, Artificial Sequence
  SAMD9L targeting guide sequence portion
uuaauaauucugaccccaccac

SEQ ID NO: 14660 - RNA, 22 nt, Artificial Sequence
  SAMD9L targeting guide sequence portion
uuacuaaauguuauaguccagc

SEQ ID NO: 14661 - RNA, 22 nt, Artificial Sequence
  SAMD9L targeting guide sequence portion
uuacuguauggacugguggacu

SEQ ID NO: 14662 - RNA, 22 nt, Artificial Sequence
  SAMD9L targeting guide sequence portion
uuagagagcuuccuucuccuua

SEQ ID NO: 14663 - RNA, 22 nt, Artificial Sequence
  SAMD9L targeting guide sequence portion
uuagaguuaauaauucugaccc

SEQ ID NO: 14664 - RNA, 22 nt, Artificial Sequence
  SAMD9L targeting guide sequence portion
uuagauauucuggacuccaaac

SEQ ID NO: 14665 - RNA, 22 nt, Artificial Sequence
  SAMD9L targeting guide sequence portion
uuagcaggaauauuuaguaguu

SEQ ID NO: 14666 - RNA, 22 nt, Artificial Sequence
  SAMD9L targeting guide sequence portion
uuaguaagacauaacuaaaggc

SEQ ID NO: 14667 - RNA, 22 nt, Artificial Sequence
  SAMD9L targeting guide sequence portion
uuaguaguuuuuccuccuuuca

SEQ ID NO: 14668 - RNA, 22 nt, Artificial Sequence
  SAMD9L targeting guide sequence portion
uuaguuaugucuuacuaaaugu

SEQ ID NO: 14669 - RNA, 22 nt, Artificial Sequence
  SAMD9L targeting guide sequence portion
uuauaacuuuuuucucuacauc

SEQ ID NO: 14670 - RNA, 22 nt, Artificial Sequence
  SAMD9L targeting guide sequence portion
uuauaaugaaaggaggaaaaac

SEQ ID NO: 14671 - RNA, 22 nt, Artificial Sequence
  SAMD9L targeting guide sequence portion
uuauaguccagcaggggaguuu

SEQ ID NO: 14672 - RNA, 22 nt, Artificial Sequence
  SAMD9L targeting guide sequence portion
uuaucuuuagaguuaauaauuc

SEQ ID NO: 14673 - RNA, 22 nt, Artificial Sequence
  SAMD9L targeting guide sequence portion
uuaugguuagcaggaauauuua

SEQ ID NO: 14674 - RNA, 22 nt, Artificial Sequence
  SAMD9L targeting guide sequence portion
uuaugucuuacuaaauguuaua

SEQ ID NO: 14675 - RNA, 22 nt, Artificial Sequence
  SAMD9L targeting guide sequence portion
uuauuaacucuaaagauaauua

SEQ ID NO: 14676 - RNA, 22 nt, Artificial Sequence
  SAMD9L targeting guide sequence portion
uucagaaagagggacauguucu

SEQ ID NO: 14677 - RNA, 22 nt, Artificial Sequence
  SAMD9L targeting guide sequence portion
uucauagaaauauaggccagaa

SEQ ID NO: 14678 - RNA, 22 nt, Artificial Sequence
  SAMD9L targeting guide sequence portion
uucauaggccuggggacauagg

SEQ ID NO: 14679 - RNA, 22 nt, Artificial Sequence
  SAMD9L targeting guide sequence portion
uucauuauaacuuuuuucucua

SEQ ID NO: 14680 - RNA, 22 nt, Artificial Sequence
  SAMD9L targeting guide sequence portion
uuccuccuuucauuauaacuuu

SEQ ID NO: 14681 - RNA, 22 nt, Artificial Sequence
  SAMD9L targeting guide sequence portion
uuccugcuaaccauaauuaucu

SEQ ID NO: 14682 - RNA, 22 nt, Artificial Sequence
  SAMD9L targeting guide sequence portion
uuccuucuccuuagcccccauu

SEQ ID NO: 14683 - RNA, 22 nt, Artificial Sequence
  SAMD9L targeting guide sequence portion
uucuaugaaucugggcaacgcu

SEQ ID NO: 14684 - RNA, 22 nt, Artificial Sequence
  SAMD9L targeting guide sequence portion
uucucuacaucaagccuuuagu

SEQ ID NO: 14685 - RNA, 22 nt, Artificial Sequence
  SAMD9L targeting guide sequence portion
uucugaaagcugugucugcugc

SEQ ID NO: 14686 - RNA, 22 nt, Artificial Sequence
  SAMD9L targeting guide sequence portion
uucugaccccaccaccagguau

SEQ ID NO: 14687 - RNA, 22 nt, Artificial Sequence
  SAMD9L targeting guide sequence portion
uucugcaguccaccaguccaua

SEQ ID NO: 14688 - RNA, 22 nt, Artificial Sequence
  SAMD9L targeting guide sequence portion
uucuggaccaugugagcguugc

SEQ ID NO: 14689 - RNA, 22 nt, Artificial Sequence
  SAMD9L targeting guide sequence portion
uucuggacuccaaacccaauuc

SEQ ID NO: 14690 - RNA, 22 nt, Artificial Sequence
  SAMD9L targeting guide sequence portion
uucuggccuauauuucuaugaa

SEQ ID NO: 14691 - RNA, 22 nt, Artificial Sequence
  SAMD9L targeting guide sequence portion
uucuucuggccuauauuucuau

SEQ ID NO: 14692 - RNA, 22 nt, Artificial Sequence
  SAMD9L targeting guide sequence portion
uucuucuugucaucaagaaguc

SEQ ID NO: 14693 - RNA, 22 nt, Artificial Sequence
  SAMD9L targeting guide sequence portion
uucuugaugacaagaagaauug

SEQ ID NO: 14694 - RNA, 22 nt, Artificial Sequence
  SAMD9L targeting guide sequence portion
uucuugucaucaagaagucuau

SEQ ID NO: 14695 - RNA, 22 nt, Artificial Sequence
  SAMD9L targeting guide sequence portion
uucuuuuaaacuccccugcugg

SEQ ID NO: 14696 - RNA, 22 nt, Artificial Sequence
  SAMD9L targeting guide sequence portion
uugaaaugggggcuaaggagaa

SEQ ID NO: 14697 - RNA, 22 nt, Artificial Sequence
  SAMD9L targeting guide sequence portion
uugaugacaagaagaauugggu

SEQ ID NO: 14698 - RNA, 22 nt, Artificial Sequence
  SAMD9L targeting guide sequence portion
uugauguagagaaaaaaguuau

SEQ ID NO: 14699 - RNA, 22 nt, Artificial Sequence
  SAMD9L targeting guide sequence portion
uugcccagauucauagaaauau

SEQ ID NO: 14700 - RNA, 22 nt, Artificial Sequence
  SAMD9L targeting guide sequence portion
uugccucccucuucugcagucc

SEQ ID NO: 14701 - RNA, 22 nt, Artificial Sequence
  SAMD9L targeting guide sequence portion
uuggagcagggucagcagcaga

SEQ ID NO: 14702 - RNA, 22 nt, Artificial Sequence
  SAMD9L targeting guide sequence portion
uuggaguccagaauaucuaagu

SEQ ID NO: 14703 - RNA, 22 nt, Artificial Sequence
  SAMD9L targeting guide sequence portion
uugggagauccuguuacuguau

SEQ ID NO: 14704 - RNA, 22 nt, Artificial Sequence
  SAMD9L targeting guide sequence portion
uuggggaguauagccacuuggg

SEQ ID NO: 14705 - RNA, 22 nt, Artificial Sequence
  SAMD9L targeting guide sequence portion
uuggguuuggaguccagaauau

SEQ ID NO: 14706 - RNA, 22 nt, Artificial Sequence
  SAMD9L targeting guide sequence portion
uuguaauguaacuuagauauuc

SEQ ID NO: 14707 - RNA, 22 nt, Artificial Sequence
  SAMD9L targeting guide sequence portion
uuguaucucuuuguaauguaac

SEQ ID NO: 14708 - RNA, 22 nt, Artificial Sequence
  SAMD9L targeting guide sequence portion
uugucaucaagaagucuaugcu

SEQ ID NO: 14709 - RNA, 22 nt, Artificial Sequence
  SAMD9L targeting guide sequence portion
uuguucauaggccuggggacau

SEQ ID NO: 14710 - RNA, 22 nt, Artificial Sequence
  SAMD9L targeting guide sequence portion
uuuaaaagaaauaggaucaggc

SEQ ID NO: 14711 - RNA, 22 nt, Artificial Sequence
  SAMD9L targeting guide sequence portion
uuuaaacuccccugcuggacua

SEQ ID NO: 14712 - RNA, 22 nt, Artificial Sequence
  SAMD9L targeting guide sequence portion
uuuagaguuaauaauucugacc

SEQ ID NO: 14713 - RNA, 22 nt, Artificial Sequence
  SAMD9L targeting guide sequence portion
uuuaguaagacauaacuaaagg

SEQ ID NO: 14714 - RNA, 22 nt, Artificial Sequence
  SAMD9L targeting guide sequence portion
uuuaguaguuuuuccuccuuuc

SEQ ID NO: 14715 - RNA, 22 nt, Artificial Sequence
  SAMD9L targeting guide sequence portion
uuuaguuaugucuuacuaaaug

SEQ ID NO: 14716 - RNA, 22 nt, Artificial Sequence
  SAMD9L targeting guide sequence portion
uuucagaaagagggacauguuc

SEQ ID NO: 14717 - RNA, 22 nt, Artificial Sequence
  SAMD9L targeting guide sequence portion
uuucauuauaacuuuuuucucu

SEQ ID NO: 14718 - RNA, 22 nt, Artificial Sequence
  SAMD9L targeting guide sequence portion
uuuccuccuuucauuauaacuu

SEQ ID NO: 14719 - RNA, 22 nt, Artificial Sequence
  SAMD9L targeting guide sequence portion
uuucuaugaaucugggcaacgc

SEQ ID NO: 14720 - RNA, 22 nt, Artificial Sequence
  SAMD9L targeting guide sequence portion
uuucucuacaucaagccuuuag

SEQ ID NO: 14721 - RNA, 22 nt, Artificial Sequence
  SAMD9L targeting guide sequence portion
uuucugaaagcugugucugcug

SEQ ID NO: 14722 - RNA, 22 nt, Artificial Sequence
  SAMD9L targeting guide sequence portion
uuucuuuuaaacuccccugcug

SEQ ID NO: 14723 - RNA, 22 nt, Artificial Sequence
  SAMD9L targeting guide sequence portion
uuuggagcagggucagcagcag

SEQ ID NO: 14724 - RNA, 22 nt, Artificial Sequence
  SAMD9L targeting guide sequence portion
uuuggaguccagaauaucuaag

SEQ ID NO: 14725 - RNA, 22 nt, Artificial Sequence
  SAMD9L targeting guide sequence portion
uuuguaauguaacuuagauauu

SEQ ID NO: 14726 - RNA, 22 nt, Artificial Sequence
  SAMD9L targeting guide sequence portion
uuuguaucucuuuguaauguaa

SEQ ID NO: 14727 - RNA, 22 nt, Artificial Sequence
  SAMD9L targeting guide sequence portion
uuuuaaacuccccugcuggacu

SEQ ID NO: 14728 - RNA, 22 nt, Artificial Sequence
  SAMD9L targeting guide sequence portion
uuuuccuccuuucauuauaacu

SEQ ID NO: 14729 - RNA, 22 nt, Artificial Sequence
  SAMD9L targeting guide sequence portion
uuuucucuacaucaagccuuua

SEQ ID NO: 14730 - RNA, 22 nt, Artificial Sequence
  SAMD9L targeting guide sequence portion
uuuuuccuccuuucauuauaac

SEQ ID NO: 14731 - RNA, 22 nt, Artificial Sequence
  SAMD9L targeting guide sequence portion
uuuuucucuacaucaagccuuu

SEQ ID NO: 14732 - RNA, 22 nt, Artificial Sequence
  SAMD9L targeting guide sequence portion
uuuuuucucuacaucaagccuu

SEQ ID NO: 14733 - RNA, 20 nt, Artificial Sequence
  SAMD9L targeting guide sequence portion
aaaaauaaaguauaauucua

SEQ ID NO: 14734 - RNA, 20 nt, Artificial Sequence
  SAMD9L targeting guide sequence portion
aaaacagauuauuuaaccaa

SEQ ID NO: 14735 - RNA, 20 nt, Artificial Sequence
  SAMD9L targeting guide sequence portion
aaaaccccaacuuucaccaa

SEQ ID NO: 14736 - RNA, 20 nt, Artificial Sequence
  SAMD9L targeting guide sequence portion
aaaacugcuugauacuuacu

SEQ ID NO: 14737 - RNA, 20 nt, Artificial Sequence
  SAMD9L targeting guide sequence portion
aaaagaaaacagauuauuua

SEQ ID NO: 14738 - RNA, 20 nt, Artificial Sequence
  SAMD9L targeting guide sequence portion
aaaagcagaaucuuaaguaa

SEQ ID NO: 14739 - RNA, 20 nt, Artificial Sequence
  SAMD9L targeting guide sequence portion
aaaaggugugucaccaguua

SEQ ID NO: 14740 - RNA, 20 nt, Artificial Sequence
  SAMD9L targeting guide sequence portion
aaaauaaaguauaauucuaa

SEQ ID NO: 14741 - RNA, 20 nt, Artificial Sequence
  SAMD9L targeting guide sequence portion
aaaauaaugaaacuggauag

SEQ ID NO: 14742 - RNA, 20 nt, Artificial Sequence
  SAMD9L targeting guide sequence portion
aaaauacuuauuauauugcu

SEQ ID NO: 14743 - RNA, 20 nt, Artificial Sequence
  SAMD9L targeting guide sequence portion
aaaauagcuaaaguaaguau

SEQ ID NO: 14744 - RNA, 20 nt, Artificial Sequence
  SAMD9L targeting guide sequence portion
aaaaucacauagacaauuau

SEQ ID NO: 14745 - RNA, 20 nt, Artificial Sequence
  SAMD9L targeting guide sequence portion
aaacaaggguaugaauuagg

SEQ ID NO: 14746 - RNA, 20 nt, Artificial Sequence
  SAMD9L targeting guide sequence portion
aaacagauuauuuaaccaac

SEQ ID NO: 14747 - RNA, 20 nt, Artificial Sequence
  SAMD9L targeting guide sequence portion
aaaccaauuucuauguuacu

SEQ ID NO: 14748 - RNA, 20 nt, Artificial Sequence
  SAMD9L targeting guide sequence portion
aaaccccaacuuucaccaag

SEQ ID NO: 14749 - RNA, 20 nt, Artificial Sequence
  SAMD9L targeting guide sequence portion
aaacugcuugauacuuacuu

SEQ ID NO: 14750 - RNA, 20 nt, Artificial Sequence
  SAMD9L targeting guide sequence portion
aaacuggauagguagaagug

SEQ ID NO: 14751 - RNA, 20 nt, Artificial Sequence
  SAMD9L targeting guide sequence portion
aaacuuuaaaauaaugaaac

SEQ ID NO: 14752 - RNA, 20 nt, Artificial Sequence
  SAMD9L targeting guide sequence portion
aaagaaaacagauuauuuaa

SEQ ID NO: 14753 - RNA, 20 nt, Artificial Sequence
  SAMD9L targeting guide sequence portion
aaagauagccagcuguggau

SEQ ID NO: 14754 - RNA, 20 nt, Artificial Sequence
  SAMD9L targeting guide sequence portion
aaagcaauauaauaaguauu

SEQ ID NO: 14755 - RNA, 20 nt, Artificial Sequence
  SAMD9L targeting guide sequence portion
aaagcagaaucuuaaguaac

SEQ ID NO: 14756 - RNA, 20 nt, Artificial Sequence
  SAMD9L targeting guide sequence portion
aaaggcugacucuuaaaacu

SEQ ID NO: 14757 - RNA, 20 nt, Artificial Sequence
  SAMD9L targeting guide sequence portion
aaaggugugucaccaguuag

SEQ ID NO: 14758 - RNA, 20 nt, Artificial Sequence
  SAMD9L targeting guide sequence portion
aaaguaaguaucaagcaguu

SEQ ID NO: 14759 - RNA, 20 nt, Artificial Sequence
  SAMD9L targeting guide sequence portion
aaaguauaauucuaaaauac

SEQ ID NO: 14760 - RNA, 20 nt, Artificial Sequence
  SAMD9L targeting guide sequence portion
aaaguugggguuuugugacu

SEQ ID NO: 14761 - RNA, 20 nt, Artificial Sequence
  SAMD9L targeting guide sequence portion
aaaguuuauuugcaauauuc

SEQ ID NO: 14762 - RNA, 20 nt, Artificial Sequence
  SAMD9L targeting guide sequence portion
aaauaaacuuuaaaauaaug

SEQ ID NO: 14763 - RNA, 20 nt, Artificial Sequence
  SAMD9L targeting guide sequence portion
aaauaaaguauaauucuaaa

SEQ ID NO: 14764 - RNA, 20 nt, Artificial Sequence
  SAMD9L targeting guide sequence portion
aaauaagcuauagcugcuaa

SEQ ID NO: 14765 - RNA, 20 nt, Artificial Sequence
  SAMD9L targeting guide sequence portion
aaauaaucuguuuucuuuug

SEQ ID NO: 14766 - RNA, 20 nt, Artificial Sequence
  SAMD9L targeting guide sequence portion
aaauaaugaaacuggauagg

SEQ ID NO: 14767 - RNA, 20 nt, Artificial Sequence
  SAMD9L targeting guide sequence portion
aaauacuuauuauauugcuu

SEQ ID NO: 14768 - RNA, 20 nt, Artificial Sequence
  SAMD9L targeting guide sequence portion
aaauagcuaaaguaaguauc

SEQ ID NO: 14769 - RNA, 20 nt, Artificial Sequence
  SAMD9L targeting guide sequence portion
aaaucacauagacaauuaug

SEQ ID NO: 14770 - RNA, 20 nt, Artificial Sequence
  SAMD9L targeting guide sequence portion
aaauugguuuccguagcaua

SEQ ID NO: 14771 - RNA, 20 nt, Artificial Sequence
  SAMD9L targeting guide sequence portion
aacaaagauagccagcugug

SEQ ID NO: 14772 - RNA, 20 nt, Artificial Sequence
  SAMD9L targeting guide sequence portion
aacaaggguaugaauuagga

SEQ ID NO: 14773 - RNA, 20 nt, Artificial Sequence
  SAMD9L targeting guide sequence portion
aacagagcaguugguuaaau

SEQ ID NO: 14774 - RNA, 20 nt, Artificial Sequence
  SAMD9L targeting guide sequence portion
aacagauuauuuaaccaacu

SEQ ID NO: 14775 - RNA, 20 nt, Artificial Sequence
  SAMD9L targeting guide sequence portion
aacagcuugaguuccaaaag

SEQ ID NO: 14776 - RNA, 20 nt, Artificial Sequence
  SAMD9L targeting guide sequence portion
aacaggaauccacagcuggc

SEQ ID NO: 14777 - RNA, 20 nt, Artificial Sequence
  SAMD9L targeting guide sequence portion
aacauagaaauugguuuccg

SEQ ID NO: 14778 - RNA, 20 nt, Artificial Sequence
  SAMD9L targeting guide sequence portion
aaccaacugcucuguuacua

SEQ ID NO: 14779 - RNA, 20 nt, Artificial Sequence
  SAMD9L targeting guide sequence portion
aaccaauuucuauguuacuu

SEQ ID NO: 14780 - RNA, 20 nt, Artificial Sequence
  SAMD9L targeting guide sequence portion
aacccacuucuaccuaucca

SEQ ID NO: 14781 - RNA, 20 nt, Artificial Sequence
  SAMD9L targeting guide sequence portion
aaccccaacuuucaccaagu

SEQ ID NO: 14782 - RNA, 20 nt, Artificial Sequence
  SAMD9L targeting guide sequence portion
aacugcucuguuacuaugua

SEQ ID NO: 14783 - RNA, 20 nt, Artificial Sequence
  SAMD9L targeting guide sequence portion
aacugcuugauacuuacuuu

SEQ ID NO: 14784 - RNA, 20 nt, Artificial Sequence
  SAMD9L targeting guide sequence portion
aacuggauagguagaagugg

SEQ ID NO: 14785 - RNA, 20 nt, Artificial Sequence
  SAMD9L targeting guide sequence portion
aacuggugacacaccuuuua

SEQ ID NO: 14786 - RNA, 20 nt, Artificial Sequence
  SAMD9L targeting guide sequence portion
aacuuggugaaaguuggggu

SEQ ID NO: 14787 - RNA, 20 nt, Artificial Sequence
  SAMD9L targeting guide sequence portion
aacuuuaaaauaaugaaacu

SEQ ID NO: 14788 - RNA, 20 nt, Artificial Sequence
  SAMD9L targeting guide sequence portion
aacuuucaccaaguuaagcu

SEQ ID NO: 14789 - RNA, 20 nt, Artificial Sequence
  SAMD9L targeting guide sequence portion
aagaaaacagauuauuuaac

SEQ ID NO: 14790 - RNA, 20 nt, Artificial Sequence
  SAMD9L targeting guide sequence portion
aagaaacaaggguaugaauu

SEQ ID NO: 14791 - RNA, 20 nt, Artificial Sequence
  SAMD9L targeting guide sequence portion
aagagucagccuuuagcaau

SEQ ID NO: 14792 - RNA, 20 nt, Artificial Sequence
  SAMD9L targeting guide sequence portion
aagauacauauauauaugua

SEQ ID NO: 14793 - RNA, 20 nt, Artificial Sequence
  SAMD9L targeting guide sequence portion
aagauagccagcuguggauu

SEQ ID NO: 14794 - RNA, 20 nt, Artificial Sequence
  SAMD9L targeting guide sequence portion
aagauucugcuuuuaaguca

SEQ ID NO: 14795 - RNA, 20 nt, Artificial Sequence
  SAMD9L targeting guide sequence portion
aagcaauauaauaaguauuu

SEQ ID NO: 14796 - RNA, 20 nt, Artificial Sequence
  SAMD9L targeting guide sequence portion
aagcagaaucuuaaguaaca

SEQ ID NO: 14797 - RNA, 20 nt, Artificial Sequence
  SAMD9L targeting guide sequence portion
aagcaguuuuaagagucagc

SEQ ID NO: 14798 - RNA, 20 nt, Artificial Sequence
  SAMD9L targeting guide sequence portion
aagcuaaaagggagaauuau

SEQ ID NO: 14799 - RNA, 20 nt, Artificial Sequence
  SAMD9L targeting guide sequence portion
aagcuauagcugcuaacugg

SEQ ID NO: 14800 - RNA, 20 nt, Artificial Sequence
  SAMD9L targeting guide sequence portion
aaggcuaaaaggugugucac

SEQ ID NO: 14801 - RNA, 20 nt, Artificial Sequence
  SAMD9L targeting guide sequence portion
aaggcugacucuuaaaacug

SEQ ID NO: 14802 - RNA, 20 nt, Artificial Sequence
  SAMD9L targeting guide sequence portion
aagggagaauuauuauaagg

SEQ ID NO: 14803 - RNA, 20 nt, Artificial Sequence
  SAMD9L targeting guide sequence portion
aaggguaugaauuaggaugg

SEQ ID NO: 14804 - RNA, 20 nt, Artificial Sequence
  SAMD9L targeting guide sequence portion
aaggugugucaccaguuagc

SEQ ID NO: 14805 - RNA, 20 nt, Artificial Sequence
  SAMD9L targeting guide sequence portion
aaguaacauagaaauugguu

SEQ ID NO: 14806 - RNA, 20 nt, Artificial Sequence
  SAMD9L targeting guide sequence portion
aaguaaguaucaagcaguuu

SEQ ID NO: 14807 - RNA, 20 nt, Artificial Sequence
  SAMD9L targeting guide sequence portion
aaguauaauucuaaaauacu

SEQ ID NO: 14808 - RNA, 20 nt, Artificial Sequence
  SAMD9L targeting guide sequence portion
aaguaucaagcaguuuuaag

SEQ ID NO: 14809 - RNA, 20 nt, Artificial Sequence
  SAMD9L targeting guide sequence portion
aaguauuuuagaauuauacu

SEQ ID NO: 14810 - RNA, 20 nt, Artificial Sequence
  SAMD9L targeting guide sequence portion
aagucacaaaaccccaacuu

SEQ ID NO: 14811 - RNA, 20 nt, Artificial Sequence
  SAMD9L targeting guide sequence portion
aaguggguugaggaacagga

SEQ ID NO: 14812 - RNA, 20 nt, Artificial Sequence
  SAMD9L targeting guide sequence portion
aaguuaagcuaaaagggaga

SEQ ID NO: 14813 - RNA, 20 nt, Artificial Sequence
  SAMD9L targeting guide sequence portion
aaguugggguuuugugacuu

SEQ ID NO: 14814 - RNA, 20 nt, Artificial Sequence
  SAMD9L targeting guide sequence portion
aaguuuauuugcaauauucc

SEQ ID NO: 14815 - RNA, 20 nt, Artificial Sequence
  SAMD9L targeting guide sequence portion
aauaaacuuuaaaauaauga

SEQ ID NO: 14816 - RNA, 20 nt, Artificial Sequence
  SAMD9L targeting guide sequence portion
aauaaaguauaauucuaaaa

SEQ ID NO: 14817 - RNA, 20 nt, Artificial Sequence
  SAMD9L targeting guide sequence portion
aauaagcuauagcugcuaac

SEQ ID NO: 14818 - RNA, 20 nt, Artificial Sequence
  SAMD9L targeting guide sequence portion
aauaaguauuuuagaauuau

SEQ ID NO: 14819 - RNA, 20 nt, Artificial Sequence
  SAMD9L targeting guide sequence portion
aauaaucuguuuucuuuugg

SEQ ID NO: 14820 - RNA, 20 nt, Artificial Sequence
  SAMD9L targeting guide sequence portion
aauaaugaaacuggauaggu

SEQ ID NO: 14821 - RNA, 20 nt, Artificial Sequence
  SAMD9L targeting guide sequence portion
aauaauucucccuuuuagcu

SEQ ID NO: 14822 - RNA, 20 nt, Artificial Sequence
  SAMD9L targeting guide sequence portion
aauacuuauuauauugcuuu

SEQ ID NO: 14823 - RNA, 20 nt, Artificial Sequence
  SAMD9L targeting guide sequence portion
aauagcuaaaguaaguauca

SEQ ID NO: 14824 - RNA, 20 nt, Artificial Sequence
  SAMD9L targeting guide sequence portion
aauauaauaaguauuuuaga

SEQ ID NO: 14825 - RNA, 20 nt, Artificial Sequence
  SAMD9L targeting guide sequence portion
aauauuauacauauauauau

SEQ ID NO: 14826 - RNA, 20 nt, Artificial Sequence
  SAMD9L targeting guide sequence portion
aauauuccuauaugcuacgg

SEQ ID NO: 14827 - RNA, 20 nt, Artificial Sequence
  SAMD9L targeting guide sequence portion
aauauugcaaauaaacuuua

SEQ ID NO: 14828 - RNA, 20 nt, Artificial Sequence
  SAMD9L targeting guide sequence portion
aauauugcuaaaggcugacu

SEQ ID NO: 14829 - RNA, 20 nt, Artificial Sequence
  SAMD9L targeting guide sequence portion
aaucacauagacaauuaugu

SEQ ID NO: 14830 - RNA, 20 nt, Artificial Sequence
  SAMD9L targeting guide sequence portion
aauccacagcuggcuaucuu

SEQ ID NO: 14831 - RNA, 20 nt, Artificial Sequence
  SAMD9L targeting guide sequence portion
aaucuguuuucuuuuggaac

SEQ ID NO: 14832 - RNA, 20 nt, Artificial Sequence
  SAMD9L targeting guide sequence portion
aaucuuaaguaacauagaaa

SEQ ID NO: 14833 - RNA, 20 nt, Artificial Sequence
  SAMD9L targeting guide sequence portion
aaugaaacuggauagguaga

SEQ ID NO: 14834 - RNA, 20 nt, Artificial Sequence
  SAMD9L targeting guide sequence portion
aauguauacauaauugucua

SEQ ID NO: 14835 - RNA, 20 nt, Artificial Sequence
  SAMD9L targeting guide sequence portion
aauuacaauuagagucaccu

SEQ ID NO: 14836 - RNA, 20 nt, Artificial Sequence
  SAMD9L targeting guide sequence portion
aauuagagucaccuaagaaa

SEQ ID NO: 14837 - RNA, 20 nt, Artificial Sequence
  SAMD9L targeting guide sequence portion
aauuaggaugguaaaauagc

SEQ ID NO: 14838 - RNA, 20 nt, Artificial Sequence
  SAMD9L targeting guide sequence portion
aauuauacuuuauuuuuaaa

SEQ ID NO: 14839 - RNA, 20 nt, Artificial Sequence
  SAMD9L targeting guide sequence portion
aauuaugaaauaagcuauag

SEQ ID NO: 14840 - RNA, 20 nt, Artificial Sequence
  SAMD9L targeting guide sequence portion
aauuauguauacauuaucau

SEQ ID NO: 14841 - RNA, 20 nt, Artificial Sequence
  SAMD9L targeting guide sequence portion
aauuauuauaaggcuaaaag

SEQ ID NO: 14842 - RNA, 20 nt, Artificial Sequence
  SAMD9L targeting guide sequence portion
aauucauacccuuguuucuu

SEQ ID NO: 14843 - RNA, 20 nt, Artificial Sequence
  SAMD9L targeting guide sequence portion
aauucuaaaauacuuauuau

SEQ ID NO: 14844 - RNA, 20 nt, Artificial Sequence
  SAMD9L targeting guide sequence portion
aauucucccuuuuagcuuaa

SEQ ID NO: 14845 - RNA, 20 nt, Artificial Sequence
  SAMD9L targeting guide sequence portion
aauugguuuccguagcauau

SEQ ID NO: 14846 - RNA, 20 nt, Artificial Sequence
  SAMD9L targeting guide sequence portion
aauuguaauuaugaaauaag

SEQ ID NO: 14847 - RNA, 20 nt, Artificial Sequence
  SAMD9L targeting guide sequence portion
aauugucuaugugauuuuaa

SEQ ID NO: 14848 - RNA, 20 nt, Artificial Sequence
  SAMD9L targeting guide sequence portion
aauuucuauguuacuuaaga

SEQ ID NO: 14849 - RNA, 20 nt, Artificial Sequence
  SAMD9L targeting guide sequence portion
acaaaaccccaacuuucacc

SEQ ID NO: 14850 - RNA, 20 nt, Artificial Sequence
  SAMD9L targeting guide sequence portion
acaaagauagccagcugugg

SEQ ID NO: 14851 - RNA, 20 nt, Artificial Sequence
  SAMD9L targeting guide sequence portion
acaaagcaauauaauaagua

SEQ ID NO: 14852 - RNA, 20 nt, Artificial Sequence
  SAMD9L targeting guide sequence portion
acaaggguaugaauuaggau

SEQ ID NO: 14853 - RNA, 20 nt, Artificial Sequence
  SAMD9L targeting guide sequence portion
acaauuagagucaccuaaga

SEQ ID NO: 14854 - RNA, 20 nt, Artificial Sequence
  SAMD9L targeting guide sequence portion
acaauuauguauacauuauc

SEQ ID NO: 14855 - RNA, 20 nt, Artificial Sequence
  SAMD9L targeting guide sequence portion
acacaccuuuuagccuuaua

SEQ ID NO: 14856 - RNA, 20 nt, Artificial Sequence
  SAMD9L targeting guide sequence portion
acaccuuuuagccuuauaau

SEQ ID NO: 14857 - RNA, 20 nt, Artificial Sequence
  SAMD9L targeting guide sequence portion
acagaagauacauauauaua

SEQ ID NO: 14858 - RNA, 20 nt, Artificial Sequence
  SAMD9L targeting guide sequence portion
acagagcaguugguuaaaua

SEQ ID NO: 14859 - RNA, 20 nt, Artificial Sequence
  SAMD9L targeting guide sequence portion
acagauuauuuaaccaacug

SEQ ID NO: 14860 - RNA, 20 nt, Artificial Sequence
  SAMD9L targeting guide sequence portion
acagcuggcuaucuuuguua

SEQ ID NO: 14861 - RNA, 20 nt, Artificial Sequence
  SAMD9L targeting guide sequence portion
acagcuugaguuccaaaaga

SEQ ID NO: 14862 - RNA, 20 nt, Artificial Sequence
  SAMD9L targeting guide sequence portion
acaggaauccacagcuggcu

SEQ ID NO: 14863 - RNA, 20 nt, Artificial Sequence
  SAMD9L targeting guide sequence portion
acauaauugucuaugugauu

SEQ ID NO: 14864 - RNA, 20 nt, Artificial Sequence
  SAMD9L targeting guide sequence portion
acauagaaauugguuuccgu

SEQ ID NO: 14865 - RNA, 20 nt, Artificial Sequence
  SAMD9L targeting guide sequence portion
acauagacaauuauguauac

SEQ ID NO: 14866 - RNA, 20 nt, Artificial Sequence
  SAMD9L targeting guide sequence portion
acauaguaacagagcaguug

SEQ ID NO: 14867 - RNA, 20 nt, Artificial Sequence
  SAMD9L targeting guide sequence portion
acauauauauauguauaaua

SEQ ID NO: 14868 - RNA, 20 nt, Artificial Sequence
  SAMD9L targeting guide sequence portion
acauauauauauguaucuuc

SEQ ID NO: 14869 - RNA, 20 nt, Artificial Sequence
  SAMD9L targeting guide sequence portion
acauuaucauacagaagaua

SEQ ID NO: 14870 - RNA, 20 nt, Artificial Sequence
  SAMD9L targeting guide sequence portion
accaacugcucuguuacuau

SEQ ID NO: 14871 - RNA, 20 nt, Artificial Sequence
  SAMD9L targeting guide sequence portion
accaaguuaagcuaaaaggg

SEQ ID NO: 14872 - RNA, 20 nt, Artificial Sequence
  SAMD9L targeting guide sequence portion
accaauuucuauguuacuua

SEQ ID NO: 14873 - RNA, 20 nt, Artificial Sequence
  SAMD9L targeting guide sequence portion
accaguuagcagcuauagcu

SEQ ID NO: 14874 - RNA, 20 nt, Artificial Sequence
  SAMD9L targeting guide sequence portion
accauccuaauucauacccu

SEQ ID NO: 14875 - RNA, 20 nt, Artificial Sequence
  SAMD9L targeting guide sequence portion
acccacuucuaccuauccag

SEQ ID NO: 14876 - RNA, 20 nt, Artificial Sequence
  SAMD9L targeting guide sequence portion
accccaacuuucaccaaguu

SEQ ID NO: 14877 - RNA, 20 nt, Artificial Sequence
  SAMD9L targeting guide sequence portion
acccuuguuucuuaggugac

SEQ ID NO: 14878 - RNA, 20 nt, Artificial Sequence
  SAMD9L targeting guide sequence portion
accuaagaaacaaggguaug

SEQ ID NO: 14879 - RNA, 20 nt, Artificial Sequence
  SAMD9L targeting guide sequence portion
accuauccaguuucauuauu

SEQ ID NO: 14880 - RNA, 20 nt, Artificial Sequence
  SAMD9L targeting guide sequence portion
accuuuuagccuuauaauaa

SEQ ID NO: 14881 - RNA, 20 nt, Artificial Sequence
  SAMD9L targeting guide sequence portion
acggaaaccaauuucuaugu

SEQ ID NO: 14882 - RNA, 20 nt, Artificial Sequence
  SAMD9L targeting guide sequence portion
acuauguaacaaagauagcc

SEQ ID NO: 14883 - RNA, 20 nt, Artificial Sequence
  SAMD9L targeting guide sequence portion
acucuaauuguaauuaugaa

SEQ ID NO: 14884 - RNA, 20 nt, Artificial Sequence
  SAMD9L targeting guide sequence portion
acucuuaaaacugcuugaua

SEQ ID NO: 14885 - RNA, 20 nt, Artificial Sequence
  SAMD9L targeting guide sequence portion
acugcucuguuacuauguaa

SEQ ID NO: 14886 - RNA, 20 nt, Artificial Sequence
  SAMD9L targeting guide sequence portion
acugcuugauacuuacuuua

SEQ ID NO: 14887 - RNA, 20 nt, Artificial Sequence
  SAMD9L targeting guide sequence portion
acuggauagguagaaguggg

SEQ ID NO: 14888 - RNA, 20 nt, Artificial Sequence
  SAMD9L targeting guide sequence portion
acuggugacacaccuuuuag

SEQ ID NO: 14889 - RNA, 20 nt, Artificial Sequence
  SAMD9L targeting guide sequence portion
acuuaaaagcagaaucuuaa

SEQ ID NO: 14890 - RNA, 20 nt, Artificial Sequence
  SAMD9L targeting guide sequence portion
acuuaagauucugcuuuuaa

SEQ ID NO: 14891 - RNA, 20 nt, Artificial Sequence
  SAMD9L targeting guide sequence portion
acuuacuuuagcuauuuuac

SEQ ID NO: 14892 - RNA, 20 nt, Artificial Sequence
  SAMD9L targeting guide sequence portion
acuucuaccuauccaguuuc

SEQ ID NO: 14893 - RNA, 20 nt, Artificial Sequence
  SAMD9L targeting guide sequence portion
acuuggugaaaguugggguu

SEQ ID NO: 14894 - RNA, 20 nt, Artificial Sequence
  SAMD9L targeting guide sequence portion
acuuuaaaauaaugaaacug

SEQ ID NO: 14895 - RNA, 20 nt, Artificial Sequence
  SAMD9L targeting guide sequence portion
acuuuagcuauuuuaccauc

SEQ ID NO: 14896 - RNA, 20 nt, Artificial Sequence
  SAMD9L targeting guide sequence portion
acuuuauuuuuaaaaucaca

SEQ ID NO: 14897 - RNA, 20 nt, Artificial Sequence
  SAMD9L targeting guide sequence portion
acuuucaccaaguuaagcua

SEQ ID NO: 14898 - RNA, 20 nt, Artificial Sequence
  SAMD9L targeting guide sequence portion
agaaaacagauuauuuaacc

SEQ ID NO: 14899 - RNA, 20 nt, Artificial Sequence
  SAMD9L targeting guide sequence portion
agaaacaaggguaugaauua

SEQ ID NO: 14900 - RNA, 20 nt, Artificial Sequence
  SAMD9L targeting guide sequence portion
agaaauugguuuccguagca

SEQ ID NO: 14901 - RNA, 20 nt, Artificial Sequence
  SAMD9L targeting guide sequence portion
agaagauacauauauauaug

SEQ ID NO: 14902 - RNA, 20 nt, Artificial Sequence
  SAMD9L targeting guide sequence portion
agaaguggguugaggaacag

SEQ ID NO: 14903 - RNA, 20 nt, Artificial Sequence
  SAMD9L targeting guide sequence portion
agaaucuuaaguaacauaga

SEQ ID NO: 14904 - RNA, 20 nt, Artificial Sequence
  SAMD9L targeting guide sequence portion
agaauuauacuuuauuuuua

SEQ ID NO: 14905 - RNA, 20 nt, Artificial Sequence
  SAMD9L targeting guide sequence portion
agaauuauuauaaggcuaaa

SEQ ID NO: 14906 - RNA, 20 nt, Artificial Sequence
  SAMD9L targeting guide sequence portion
agacaaagcaauauaauaag

SEQ ID NO: 14907 - RNA, 20 nt, Artificial Sequence
  SAMD9L targeting guide sequence portion
agacaauuauguauacauua

SEQ ID NO: 14908 - RNA, 20 nt, Artificial Sequence
  SAMD9L targeting guide sequence portion
agagcaguugguuaaauaau

SEQ ID NO: 14909 - RNA, 20 nt, Artificial Sequence
  SAMD9L targeting guide sequence portion
agagucaccuaagaaacaag

SEQ ID NO: 14910 - RNA, 20 nt, Artificial Sequence
  SAMD9L targeting guide sequence portion
agagucagccuuuagcaaua

SEQ ID NO: 14911 - RNA, 20 nt, Artificial Sequence
  SAMD9L targeting guide sequence portion
agauacauauauauauguau

SEQ ID NO: 14912 - RNA, 20 nt, Artificial Sequence
  SAMD9L targeting guide sequence portion
agauagccagcuguggauuc

SEQ ID NO: 14913 - RNA, 20 nt, Artificial Sequence
  SAMD9L targeting guide sequence portion
agauuauuuaaccaacugcu

SEQ ID NO: 14914 - RNA, 20 nt, Artificial Sequence
  SAMD9L targeting guide sequence portion
agauucugcuuuuaagucac

SEQ ID NO: 14915 - RNA, 20 nt, Artificial Sequence
  SAMD9L targeting guide sequence portion
agcaauauaauaaguauuuu

SEQ ID NO: 14916 - RNA, 20 nt, Artificial Sequence
  SAMD9L targeting guide sequence portion
agcaauauuauacauauaua

SEQ ID NO: 14917 - RNA, 20 nt, Artificial Sequence
  SAMD9L targeting guide sequence portion
agcagaaucuuaaguaacau

SEQ ID NO: 14918 - RNA, 20 nt, Artificial Sequence
  SAMD9L targeting guide sequence portion
agcagcuauagcuuauuuca

SEQ ID NO: 14919 - RNA, 20 nt, Artificial Sequence
  SAMD9L targeting guide sequence portion
agcaguugguuaaauaaucu

SEQ ID NO: 14920 - RNA, 20 nt, Artificial Sequence
  SAMD9L targeting guide sequence portion
agcaguuuuaagagucagcc

SEQ ID NO: 14921 - RNA, 20 nt, Artificial Sequence
  SAMD9L targeting guide sequence portion
agcauauaggaauauugcaa

SEQ ID NO: 14922 - RNA, 20 nt, Artificial Sequence
  SAMD9L targeting guide sequence portion
agccagcuguggauuccugu

SEQ ID NO: 14923 - RNA, 20 nt, Artificial Sequence
  SAMD9L targeting guide sequence portion
agccuuauaauaauucuccc

SEQ ID NO: 14924 - RNA, 20 nt, Artificial Sequence
  SAMD9L targeting guide sequence portion
agccuuuagcaauauuauac

SEQ ID NO: 14925 - RNA, 20 nt, Artificial Sequence
  SAMD9L targeting guide sequence portion
agcuaaaagggagaauuauu

SEQ ID NO: 14926 - RNA, 20 nt, Artificial Sequence
  SAMD9L targeting guide sequence portion
agcuaaaguaaguaucaagc

SEQ ID NO: 14927 - RNA, 20 nt, Artificial Sequence
  SAMD9L targeting guide sequence portion
agcuauagcugcuaacuggu

SEQ ID NO: 14928 - RNA, 20 nt, Artificial Sequence
  SAMD9L targeting guide sequence portion
agcuauagcuuauuucauaa

SEQ ID NO: 14929 - RNA, 20 nt, Artificial Sequence
  SAMD9L targeting guide sequence portion
agcuauuuuaccauccuaau

SEQ ID NO: 14930 - RNA, 20 nt, Artificial Sequence
  SAMD9L targeting guide sequence portion
agcugcuaacuggugacaca

SEQ ID NO: 14931 - RNA, 20 nt, Artificial Sequence
  SAMD9L targeting guide sequence portion
agcuggcuaucuuuguuaca

SEQ ID NO: 14932 - RNA, 20 nt, Artificial Sequence
  SAMD9L targeting guide sequence portion
agcuguggauuccuguuccu

SEQ ID NO: 14933 - RNA, 20 nt, Artificial Sequence
  SAMD9L targeting guide sequence portion
agcuuaacuuggugaaaguu

SEQ ID NO: 14934 - RNA, 20 nt, Artificial Sequence
  SAMD9L targeting guide sequence portion
agcuuauuucauaauuacaa

SEQ ID NO: 14935 - RNA, 20 nt, Artificial Sequence
  SAMD9L targeting guide sequence portion
agcuugaguuccaaaagaaa

SEQ ID NO: 14936 - RNA, 20 nt, Artificial Sequence
  SAMD9L targeting guide sequence portion
aggaacaggaauccacagcu

SEQ ID NO: 14937 - RNA, 20 nt, Artificial Sequence
  SAMD9L targeting guide sequence portion
aggaauauugcaaauaaacu

SEQ ID NO: 14938 - RNA, 20 nt, Artificial Sequence
  SAMD9L targeting guide sequence portion
aggaauccacagcuggcuau

SEQ ID NO: 14939 - RNA, 20 nt, Artificial Sequence
  SAMD9L targeting guide sequence portion
aggaugguaaaauagcuaaa

SEQ ID NO: 14940 - RNA, 20 nt, Artificial Sequence
  SAMD9L targeting guide sequence portion
aggcuaaaaggugugucacc

SEQ ID NO: 14941 - RNA, 20 nt, Artificial Sequence
  SAMD9L targeting guide sequence portion
aggcugacucuuaaaacugc

SEQ ID NO: 14942 - RNA, 20 nt, Artificial Sequence
  SAMD9L targeting guide sequence portion
agggagaauuauuauaaggc

SEQ ID NO: 14943 - RNA, 20 nt, Artificial Sequence
  SAMD9L targeting guide sequence portion
aggguaugaauuaggauggu

SEQ ID NO: 14944 - RNA, 20 nt, Artificial Sequence
  SAMD9L targeting guide sequence portion
agguagaaguggguugagga

SEQ ID NO: 14945 - RNA, 20 nt, Artificial Sequence
  SAMD9L targeting guide sequence portion
aggugacucuaauuguaauu

SEQ ID NO: 14946 - RNA, 20 nt, Artificial Sequence
  SAMD9L targeting guide sequence portion
aggugugucaccaguuagca

SEQ ID NO: 14947 - RNA, 20 nt, Artificial Sequence
  SAMD9L targeting guide sequence portion
aguaacagagcaguugguua

SEQ ID NO: 14948 - RNA, 20 nt, Artificial Sequence
  SAMD9L targeting guide sequence portion
aguaacauagaaauugguuu

SEQ ID NO: 14949 - RNA, 20 nt, Artificial Sequence
  SAMD9L targeting guide sequence portion
aguaaguaucaagcaguuuu

SEQ ID NO: 14950 - RNA, 20 nt, Artificial Sequence
  SAMD9L targeting guide sequence portion
aguauaauucuaaaauacuu

SEQ ID NO: 14951 - RNA, 20 nt, Artificial Sequence
  SAMD9L targeting guide sequence portion
aguaucaagcaguuuuaaga

SEQ ID NO: 14952 - RNA, 20 nt, Artificial Sequence
  SAMD9L targeting guide sequence portion
aguauuuuagaauuauacuu

SEQ ID NO: 14953 - RNA, 20 nt, Artificial Sequence
  SAMD9L targeting guide sequence portion
agucacaaaaccccaacuuu

SEQ ID NO: 14954 - RNA, 20 nt, Artificial Sequence
  SAMD9L targeting guide sequence portion
agucaccuaagaaacaaggg

SEQ ID NO: 14955 - RNA, 20 nt, Artificial Sequence
  SAMD9L targeting guide sequence portion
agucagccuuuagcaauauu

SEQ ID NO: 14956 - RNA, 20 nt, Artificial Sequence
  SAMD9L targeting guide sequence portion
aguggguugaggaacaggaa

SEQ ID NO: 14957 - RNA, 20 nt, Artificial Sequence
  SAMD9L targeting guide sequence portion
aguuaagcuaaaagggagaa

SEQ ID NO: 14958 - RNA, 20 nt, Artificial Sequence
  SAMD9L targeting guide sequence portion
aguuagcagcuauagcuuau

SEQ ID NO: 14959 - RNA, 20 nt, Artificial Sequence
  SAMD9L targeting guide sequence portion
aguuccaaaagaaaacagau

SEQ ID NO: 14960 - RNA, 20 nt, Artificial Sequence
  SAMD9L targeting guide sequence portion
aguugggguuuugugacuua

SEQ ID NO: 14961 - RNA, 20 nt, Artificial Sequence
  SAMD9L targeting guide sequence portion
aguugguuaaauaaucuguu

SEQ ID NO: 14962 - RNA, 20 nt, Artificial Sequence
  SAMD9L targeting guide sequence portion
aguuuauuugcaauauuccu

SEQ ID NO: 14963 - RNA, 20 nt, Artificial Sequence
  SAMD9L targeting guide sequence portion
aguuucauuauuuuaaaguu

SEQ ID NO: 14964 - RNA, 20 nt, Artificial Sequence
  SAMD9L targeting guide sequence portion
aguuuuaagagucagccuuu

SEQ ID NO: 14965 - RNA, 20 nt, Artificial Sequence
  SAMD9L targeting guide sequence portion
auaaacuuuaaaauaaugaa

SEQ ID NO: 14966 - RNA, 20 nt, Artificial Sequence
  SAMD9L targeting guide sequence portion
auaaaguauaauucuaaaau

SEQ ID NO: 14967 - RNA, 20 nt, Artificial Sequence
  SAMD9L targeting guide sequence portion
auaagcuauagcugcuaacu

SEQ ID NO: 14968 - RNA, 20 nt, Artificial Sequence
  SAMD9L targeting guide sequence portion
auaaggcuaaaagguguguc

SEQ ID NO: 14969 - RNA, 20 nt, Artificial Sequence
  SAMD9L targeting guide sequence portion
auaaguauuuuagaauuaua

SEQ ID NO: 14970 - RNA, 20 nt, Artificial Sequence
  SAMD9L targeting guide sequence portion
auaauaaguauuuuagaauu

SEQ ID NO: 14971 - RNA, 20 nt, Artificial Sequence
  SAMD9L targeting guide sequence portion
auaauaauucucccuuuuag

SEQ ID NO: 14972 - RNA, 20 nt, Artificial Sequence
  SAMD9L targeting guide sequence portion
auaauauugcuaaaggcuga

SEQ ID NO: 14973 - RNA, 20 nt, Artificial Sequence
  SAMD9L targeting guide sequence portion
auaaucuguuuucuuuugga

SEQ ID NO: 14974 - RNA, 20 nt, Artificial Sequence
  SAMD9L targeting guide sequence portion
auaaugaaacuggauaggua

SEQ ID NO: 14975 - RNA, 20 nt, Artificial Sequence
  SAMD9L targeting guide sequence portion
auaauguauacauaauuguc

SEQ ID NO: 14976 - RNA, 20 nt, Artificial Sequence
  SAMD9L targeting guide sequence portion
auaauuacaauuagagucac

SEQ ID NO: 14977 - RNA, 20 nt, Artificial Sequence
  SAMD9L targeting guide sequence portion
auaauucuaaaauacuuauu

SEQ ID NO: 14978 - RNA, 20 nt, Artificial Sequence
  SAMD9L targeting guide sequence portion
auaauucucccuuuuagcuu

SEQ ID NO: 14979 - RNA, 20 nt, Artificial Sequence
  SAMD9L targeting guide sequence portion
auaauugucuaugugauuuu

SEQ ID NO: 14980 - RNA, 20 nt, Artificial Sequence
  SAMD9L targeting guide sequence portion
auacagaagauacauauaua

SEQ ID NO: 14981 - RNA, 20 nt, Artificial Sequence
  SAMD9L targeting guide sequence portion
auacauaauugucuauguga

SEQ ID NO: 14982 - RNA, 20 nt, Artificial Sequence
  SAMD9L targeting guide sequence portion
auacauauauauauguauaa

SEQ ID NO: 14983 - RNA, 20 nt, Artificial Sequence
  SAMD9L targeting guide sequence portion
auacauauauauauguaucu

SEQ ID NO: 14984 - RNA, 20 nt, Artificial Sequence
  SAMD9L targeting guide sequence portion
auacauuaucauacagaaga

SEQ ID NO: 14985 - RNA, 20 nt, Artificial Sequence
  SAMD9L targeting guide sequence portion
auacccuuguuucuuaggug

SEQ ID NO: 14986 - RNA, 20 nt, Artificial Sequence
  SAMD9L targeting guide sequence portion
auacuuacuuuagcuauuuu

SEQ ID NO: 14987 - RNA, 20 nt, Artificial Sequence
  SAMD9L targeting guide sequence portion
auacuuauuauauugcuuug

SEQ ID NO: 14988 - RNA, 20 nt, Artificial Sequence
  SAMD9L targeting guide sequence portion
auacuuuauuuuuaaaauca

SEQ ID NO: 14989 - RNA, 20 nt, Artificial Sequence
  SAMD9L targeting guide sequence portion
auagaaauugguuuccguag

SEQ ID NO: 14990 - RNA, 20 nt, Artificial Sequence
  SAMD9L targeting guide sequence portion
auagacaauuauguauacau

SEQ ID NO: 14991 - RNA, 20 nt, Artificial Sequence
  SAMD9L targeting guide sequence portion
auagccagcuguggauuccu

SEQ ID NO: 14992 - RNA, 20 nt, Artificial Sequence
  SAMD9L targeting guide sequence portion
auagcuaaaguaaguaucaa

SEQ ID NO: 14993 - RNA, 20 nt, Artificial Sequence
  SAMD9L targeting guide sequence portion
auagcugcuaacuggugaca

SEQ ID NO: 14994 - RNA, 20 nt, Artificial Sequence
  SAMD9L targeting guide sequence portion
auagcuuauuucauaauuac

SEQ ID NO: 14995 - RNA, 20 nt, Artificial Sequence
  SAMD9L targeting guide sequence portion
auaggaauauugcaaauaaa

SEQ ID NO: 14996 - RNA, 20 nt, Artificial Sequence
  SAMD9L targeting guide sequence portion
auagguagaaguggguugag

SEQ ID NO: 14997 - RNA, 20 nt, Artificial Sequence
  SAMD9L targeting guide sequence portion
auaguaacagagcaguuggu

SEQ ID NO: 14998 - RNA, 20 nt, Artificial Sequence
  SAMD9L targeting guide sequence portion
auauaauaaguauuuuagaa

SEQ ID NO: 14999 - RNA, 20 nt, Artificial Sequence
  SAMD9L targeting guide sequence portion
auauaggaauauugcaaaua

SEQ ID NO: 15000 - RNA, 20 nt, Artificial Sequence
  SAMD9L targeting guide sequence portion
auauauauauguauaauauu

SEQ ID NO: 15001 - RNA, 20 nt, Artificial Sequence
  SAMD9L targeting guide sequence portion
auauauauauguaucuucug

SEQ ID NO: 15002 - RNA, 20 nt, Artificial Sequence
  SAMD9L targeting guide sequence portion
auauauauguauaauauugc

SEQ ID NO: 15003 - RNA, 20 nt, Artificial Sequence
  SAMD9L targeting guide sequence portion
auauauauguaucuucugua

SEQ ID NO: 15004 - RNA, 20 nt, Artificial Sequence
  SAMD9L targeting guide sequence portion
auauauguauaauauugcua

SEQ ID NO: 15005 - RNA, 20 nt, Artificial Sequence
  SAMD9L targeting guide sequence portion
auauauguaucuucuguaug

SEQ ID NO: 15006 - RNA, 20 nt, Artificial Sequence
  SAMD9L targeting guide sequence portion
auaugcuacggaaaccaauu

SEQ ID NO: 15007 - RNA, 20 nt, Artificial Sequence
  SAMD9L targeting guide sequence portion
auauguauaauauugcuaaa

SEQ ID NO: 15008 - RNA, 20 nt, Artificial Sequence
  SAMD9L targeting guide sequence portion
auauguaucuucuguaugau

SEQ ID NO: 15009 - RNA, 20 nt, Artificial Sequence
  SAMD9L targeting guide sequence portion
auauuauacauauauauaug

SEQ ID NO: 15010 - RNA, 20 nt, Artificial Sequence
  SAMD9L targeting guide sequence portion
auauuccuauaugcuacgga

SEQ ID NO: 15011 - RNA, 20 nt, Artificial Sequence
  SAMD9L targeting guide sequence portion
auauugcaaauaaacuuuaa

SEQ ID NO: 15012 - RNA, 20 nt, Artificial Sequence
  SAMD9L targeting guide sequence portion
auauugcuaaaggcugacuc

SEQ ID NO: 15013 - RNA, 20 nt, Artificial Sequence
  SAMD9L targeting guide sequence portion
aucaagcaguuuuaagaguc

SEQ ID NO: 15014 - RNA, 20 nt, Artificial Sequence
  SAMD9L targeting guide sequence portion
aucacauagacaauuaugua

SEQ ID NO: 15015 - RNA, 20 nt, Artificial Sequence
  SAMD9L targeting guide sequence portion
aucauacagaagauacauau

SEQ ID NO: 15016 - RNA, 20 nt, Artificial Sequence
  SAMD9L targeting guide sequence portion
auccacagcuggcuaucuuu

SEQ ID NO: 15017 - RNA, 20 nt, Artificial Sequence
  SAMD9L targeting guide sequence portion
auccaguuucauuauuuuaa

SEQ ID NO: 15018 - RNA, 20 nt, Artificial Sequence
  SAMD9L targeting guide sequence portion
auccuaauucauacccuugu

SEQ ID NO: 15019 - RNA, 20 nt, Artificial Sequence
  SAMD9L targeting guide sequence portion
aucuguuuucuuuuggaacu

SEQ ID NO: 15020 - RNA, 20 nt, Artificial Sequence
  SAMD9L targeting guide sequence portion
aucuuaaguaacauagaaau

SEQ ID NO: 15021 - RNA, 20 nt, Artificial Sequence
  SAMD9L targeting guide sequence portion
aucuucuguaugauaaugua

SEQ ID NO: 15022 - RNA, 20 nt, Artificial Sequence
  SAMD9L targeting guide sequence portion
aucuuuguuacauaguaaca

SEQ ID NO: 15023 - RNA, 20 nt, Artificial Sequence
  SAMD9L targeting guide sequence portion
augaaacuggauagguagaa

SEQ ID NO: 15024 - RNA, 20 nt, Artificial Sequence
  SAMD9L targeting guide sequence portion
augaaauaagcuauagcugc

SEQ ID NO: 15025 - RNA, 20 nt, Artificial Sequence
  SAMD9L targeting guide sequence portion
augaauuaggaugguaaaau

SEQ ID NO: 15026 - RNA, 20 nt, Artificial Sequence
  SAMD9L targeting guide sequence portion
augauaauguauacauaauu

SEQ ID NO: 15027 - RNA, 20 nt, Artificial Sequence
  SAMD9L targeting guide sequence portion
augcuacggaaaccaauuuc

SEQ ID NO: 15028 - RNA, 20 nt, Artificial Sequence
  SAMD9L targeting guide sequence portion
augguaaaauagcuaaagua

SEQ ID NO: 15029 - RNA, 20 nt, Artificial Sequence
  SAMD9L targeting guide sequence portion
auguaacaaagauagccagc

SEQ ID NO: 15030 - RNA, 20 nt, Artificial Sequence
  SAMD9L targeting guide sequence portion
auguauaauauugcuaaagg

SEQ ID NO: 15031 - RNA, 20 nt, Artificial Sequence
  SAMD9L targeting guide sequence portion
auguauacauaauugucuau

SEQ ID NO: 15032 - RNA, 20 nt, Artificial Sequence
  SAMD9L targeting guide sequence portion
auguauacauuaucauacag

SEQ ID NO: 15033 - RNA, 20 nt, Artificial Sequence
  SAMD9L targeting guide sequence portion
auguaucuucuguaugauaa

SEQ ID NO: 15034 - RNA, 20 nt, Artificial Sequence
  SAMD9L targeting guide sequence portion
augugauuuuaaaaauaaag

SEQ ID NO: 15035 - RNA, 20 nt, Artificial Sequence
  SAMD9L targeting guide sequence portion
auguuacuuaagauucugcu

SEQ ID NO: 15036 - RNA, 20 nt, Artificial Sequence
  SAMD9L targeting guide sequence portion
auuacaauuagagucaccua

SEQ ID NO: 15037 - RNA, 20 nt, Artificial Sequence
  SAMD9L targeting guide sequence portion
auuagagucaccuaagaaac

SEQ ID NO: 15038 - RNA, 20 nt, Artificial Sequence
  SAMD9L targeting guide sequence portion
auuaggaugguaaaauagcu

SEQ ID NO: 15039 - RNA, 20 nt, Artificial Sequence
  SAMD9L targeting guide sequence portion
auuauaaggcuaaaaggugu

SEQ ID NO: 15040 - RNA, 20 nt, Artificial Sequence
  SAMD9L targeting guide sequence portion
auuauacauauauauaugua

SEQ ID NO: 15041 - RNA, 20 nt, Artificial Sequence
  SAMD9L targeting guide sequence portion
auuauacuuuauuuuuaaaa

SEQ ID NO: 15042 - RNA, 20 nt, Artificial Sequence
  SAMD9L targeting guide sequence portion
auuaucauacagaagauaca

SEQ ID NO: 15043 - RNA, 20 nt, Artificial Sequence
  SAMD9L targeting guide sequence portion
auuaugaaauaagcuauagc

SEQ ID NO: 15044 - RNA, 20 nt, Artificial Sequence
  SAMD9L targeting guide sequence portion
auuauguauacauuaucaua

SEQ ID NO: 15045 - RNA, 20 nt, Artificial Sequence
  SAMD9L targeting guide sequence portion
auuauuauaaggcuaaaagg

SEQ ID NO: 15046 - RNA, 20 nt, Artificial Sequence
  SAMD9L targeting guide sequence portion
auuauuuaaccaacugcucu

SEQ ID NO: 15047 - RNA, 20 nt, Artificial Sequence
  SAMD9L targeting guide sequence portion
auuauuuuaaaguuuauuug

SEQ ID NO: 15048 - RNA, 20 nt, Artificial Sequence
  SAMD9L targeting guide sequence portion
auucauacccuuguuucuua

SEQ ID NO: 15049 - RNA, 20 nt, Artificial Sequence
  SAMD9L targeting guide sequence portion
auuccuauaugcuacggaaa

SEQ ID NO: 15050 - RNA, 20 nt, Artificial Sequence
  SAMD9L targeting guide sequence portion
auuccuguuccucaacccac

SEQ ID NO: 15051 - RNA, 20 nt, Artificial Sequence
  SAMD9L targeting guide sequence portion
auucuaaaauacuuauuaua

SEQ ID NO: 15052 - RNA, 20 nt, Artificial Sequence
  SAMD9L targeting guide sequence portion
auucucccuuuuagcuuaac

SEQ ID NO: 15053 - RNA, 20 nt, Artificial Sequence
  SAMD9L targeting guide sequence portion
auucugcuuuuaagucacaa

SEQ ID NO: 15054 - RNA, 20 nt, Artificial Sequence
  SAMD9L targeting guide sequence portion
auugcaaauaaacuuuaaaa

SEQ ID NO: 15055 - RNA, 20 nt, Artificial Sequence
  SAMD9L targeting guide sequence portion
auugcuaaaggcugacucuu

SEQ ID NO: 15056 - RNA, 20 nt, Artificial Sequence
  SAMD9L targeting guide sequence portion
auugguuuccguagcauaua

SEQ ID NO: 15057 - RNA, 20 nt, Artificial Sequence
  SAMD9L targeting guide sequence portion
auuguaauuaugaaauaagc

SEQ ID NO: 15058 - RNA, 20 nt, Artificial Sequence
  SAMD9L targeting guide sequence portion
auugucuaugugauuuuaaa

SEQ ID NO: 15059 - RNA, 20 nt, Artificial Sequence
  SAMD9L targeting guide sequence portion
auuuaaccaacugcucuguu

SEQ ID NO: 15060 - RNA, 20 nt, Artificial Sequence
  SAMD9L targeting guide sequence portion
auuucauaauuacaauuaga

SEQ ID NO: 15061 - RNA, 20 nt, Artificial Sequence
  SAMD9L targeting guide sequence portion
auuucuauguuacuuaagau

SEQ ID NO: 15062 - RNA, 20 nt, Artificial Sequence
  SAMD9L targeting guide sequence portion
auuugcaauauuccuauaug

SEQ ID NO: 15063 - RNA, 20 nt, Artificial Sequence
  SAMD9L targeting guide sequence portion
auuuuaaaaauaaaguauaa

SEQ ID NO: 15064 - RNA, 20 nt, Artificial Sequence
  SAMD9L targeting guide sequence portion
auuuuaaaguuuauuugcaa

SEQ ID NO: 15065 - RNA, 20 nt, Artificial Sequence
  SAMD9L targeting guide sequence portion
auuuuaccauccuaauucau

SEQ ID NO: 15066 - RNA, 20 nt, Artificial Sequence
  SAMD9L targeting guide sequence portion
auuuuagaauuauacuuuau

SEQ ID NO: 15067 - RNA, 20 nt, Artificial Sequence
  SAMD9L targeting guide sequence portion
auuuuuaaaaucacauagac

SEQ ID NO: 15068 - RNA, 20 nt, Artificial Sequence
  SAMD9L targeting guide sequence portion
caaaaccccaacuuucacca

SEQ ID NO: 15069 - RNA, 20 nt, Artificial Sequence
  SAMD9L targeting guide sequence portion
caaaagaaaacagauuauuu

SEQ ID NO: 15070 - RNA, 20 nt, Artificial Sequence
  SAMD9L targeting guide sequence portion
caaagauagccagcugugga

SEQ ID NO: 15071 - RNA, 20 nt, Artificial Sequence
  SAMD9L targeting guide sequence portion
caaagcaauauaauaaguau

SEQ ID NO: 15072 - RNA, 20 nt, Artificial Sequence
  SAMD9L targeting guide sequence portion
caaauaaacuuuaaaauaau

SEQ ID NO: 15073 - RNA, 20 nt, Artificial Sequence
  SAMD9L targeting guide sequence portion
caacccacuucuaccuaucc

SEQ ID NO: 15074 - RNA, 20 nt, Artificial Sequence
  SAMD9L targeting guide sequence portion
caacugcucuguuacuaugu

SEQ ID NO: 15075 - RNA, 20 nt, Artificial Sequence
  SAMD9L targeting guide sequence portion
caacuuucaccaaguuaagc

SEQ ID NO: 15076 - RNA, 20 nt, Artificial Sequence
  SAMD9L targeting guide sequence portion
caagcaguuuuaagagucag

SEQ ID NO: 15077 - RNA, 20 nt, Artificial Sequence
  SAMD9L targeting guide sequence portion
caaggguaugaauuaggaug

SEQ ID NO: 15078 - RNA, 20 nt, Artificial Sequence
  SAMD9L targeting guide sequence portion
caaguuaagcuaaaagggag

SEQ ID NO: 15079 - RNA, 20 nt, Artificial Sequence
  SAMD9L targeting guide sequence portion
caauauaauaaguauuuuag

SEQ ID NO: 15080 - RNA, 20 nt, Artificial Sequence
  SAMD9L targeting guide sequence portion
caauauuauacauauauaua

SEQ ID NO: 15081 - RNA, 20 nt, Artificial Sequence
  SAMD9L targeting guide sequence portion
caauauuccuauaugcuacg

SEQ ID NO: 15082 - RNA, 20 nt, Artificial Sequence
  SAMD9L targeting guide sequence portion
caauuagagucaccuaagaa

SEQ ID NO: 15083 - RNA, 20 nt, Artificial Sequence
  SAMD9L targeting guide sequence portion
caauuauguauacauuauca

SEQ ID NO: 15084 - RNA, 20 nt, Artificial Sequence
  SAMD9L targeting guide sequence portion
caauuucuauguuacuuaag

SEQ ID NO: 15085 - RNA, 20 nt, Artificial Sequence
  SAMD9L targeting guide sequence portion
cacaaaaccccaacuuucac

SEQ ID NO: 15086 - RNA, 20 nt, Artificial Sequence
  SAMD9L targeting guide sequence portion
cacaccuuuuagccuuauaa

SEQ ID NO: 15087 - RNA, 20 nt, Artificial Sequence
  SAMD9L targeting guide sequence portion
cacagcuggcuaucuuuguu

SEQ ID NO: 15088 - RNA, 20 nt, Artificial Sequence
  SAMD9L targeting guide sequence portion
cacauagacaauuauguaua

SEQ ID NO: 15089 - RNA, 20 nt, Artificial Sequence
  SAMD9L targeting guide sequence portion
caccaaguuaagcuaaaagg

SEQ ID NO: 15090 - RNA, 20 nt, Artificial Sequence
  SAMD9L targeting guide sequence portion
caccaguuagcagcuauagc

SEQ ID NO: 15091 - RNA, 20 nt, Artificial Sequence
  SAMD9L targeting guide sequence portion
caccuaagaaacaaggguau

SEQ ID NO: 15092 - RNA, 20 nt, Artificial Sequence
  SAMD9L targeting guide sequence portion
caccuuuuagccuuauaaua

SEQ ID NO: 15093 - RNA, 20 nt, Artificial Sequence
  SAMD9L targeting guide sequence portion
cacuucuaccuauccaguuu

SEQ ID NO: 15094 - RNA, 20 nt, Artificial Sequence
  SAMD9L targeting guide sequence portion
cagaagauacauauauauau

SEQ ID NO: 15095 - RNA, 20 nt, Artificial Sequence
  SAMD9L targeting guide sequence portion
cagaaucuuaaguaacauag

SEQ ID NO: 15096 - RNA, 20 nt, Artificial Sequence
  SAMD9L targeting guide sequence portion
cagagcaguugguuaaauaa

SEQ ID NO: 15097 - RNA, 20 nt, Artificial Sequence
  SAMD9L targeting guide sequence portion
cagauuauuuaaccaacugc

SEQ ID NO: 15098 - RNA, 20 nt, Artificial Sequence
  SAMD9L targeting guide sequence portion
cagccuuuagcaauauuaua

SEQ ID NO: 15099 - RNA, 20 nt, Artificial Sequence
  SAMD9L targeting guide sequence portion
cagcuauagcuuauuucaua

SEQ ID NO: 15100 - RNA, 20 nt, Artificial Sequence
  SAMD9L targeting guide sequence portion
cagcuggcuaucuuuguuac

SEQ ID NO: 15101 - RNA, 20 nt, Artificial Sequence
  SAMD9L targeting guide sequence portion
cagcuguggauuccuguucc

SEQ ID NO: 15102 - RNA, 20 nt, Artificial Sequence
  SAMD9L targeting guide sequence portion
cagcuugaguuccaaaagaa

SEQ ID NO: 15103 - RNA, 20 nt, Artificial Sequence
  SAMD9L targeting guide sequence portion
caggaauccacagcuggcua

SEQ ID NO: 15104 - RNA, 20 nt, Artificial Sequence
  SAMD9L targeting guide sequence portion
caguuagcagcuauagcuua

SEQ ID NO: 15105 - RNA, 20 nt, Artificial Sequence
  SAMD9L targeting guide sequence portion
caguugguuaaauaaucugu

SEQ ID NO: 15106 - RNA, 20 nt, Artificial Sequence
  SAMD9L targeting guide sequence portion
caguuucauuauuuuaaagu

SEQ ID NO: 15107 - RNA, 20 nt, Artificial Sequence
  SAMD9L targeting guide sequence portion
caguuuuaagagucagccuu

SEQ ID NO: 15108 - RNA, 20 nt, Artificial Sequence
  SAMD9L targeting guide sequence portion
cauaauuacaauuagaguca

SEQ ID NO: 15109 - RNA, 20 nt, Artificial Sequence
  SAMD9L targeting guide sequence portion
cauaauugucuaugugauuu

SEQ ID NO: 15110 - RNA, 20 nt, Artificial Sequence
  SAMD9L targeting guide sequence portion
cauacagaagauacauauau

SEQ ID NO: 15111 - RNA, 20 nt, Artificial Sequence
  SAMD9L targeting guide sequence portion
cauacccuuguuucuuaggu

SEQ ID NO: 15112 - RNA, 20 nt, Artificial Sequence
  SAMD9L targeting guide sequence portion
cauagaaauugguuuccgua

SEQ ID NO: 15113 - RNA, 20 nt, Artificial Sequence
  SAMD9L targeting guide sequence portion
cauagacaauuauguauaca

SEQ ID NO: 15114 - RNA, 20 nt, Artificial Sequence
  SAMD9L targeting guide sequence portion
cauaguaacagagcaguugg

SEQ ID NO: 15115 - RNA, 20 nt, Artificial Sequence
  SAMD9L targeting guide sequence portion
cauauaggaauauugcaaau

SEQ ID NO: 15116 - RNA, 20 nt, Artificial Sequence
  SAMD9L targeting guide sequence portion
cauauauauauguauaauau

SEQ ID NO: 15117 - RNA, 20 nt, Artificial Sequence
  SAMD9L targeting guide sequence portion
cauauauauauguaucuucu

SEQ ID NO: 15118 - RNA, 20 nt, Artificial Sequence
  SAMD9L targeting guide sequence portion
cauccuaauucauacccuug

SEQ ID NO: 15119 - RNA, 20 nt, Artificial Sequence
  SAMD9L targeting guide sequence portion
cauuaucauacagaagauac

SEQ ID NO: 15120 - RNA, 20 nt, Artificial Sequence
  SAMD9L targeting guide sequence portion
cauuauuuuaaaguuuauuu

SEQ ID NO: 15121 - RNA, 20 nt, Artificial Sequence
  SAMD9L targeting guide sequence portion
ccaaaagaaaacagauuauu

SEQ ID NO: 15122 - RNA, 20 nt, Artificial Sequence
  SAMD9L targeting guide sequence portion
ccaacugcucuguuacuaug

SEQ ID NO: 15123 - RNA, 20 nt, Artificial Sequence
  SAMD9L targeting guide sequence portion
ccaacuuucaccaaguuaag

SEQ ID NO: 15124 - RNA, 20 nt, Artificial Sequence
  SAMD9L targeting guide sequence portion
ccaaguuaagcuaaaaggga

SEQ ID NO: 15125 - RNA, 20 nt, Artificial Sequence
  SAMD9L targeting guide sequence portion
ccaauuucuauguuacuuaa

SEQ ID NO: 15126 - RNA, 20 nt, Artificial Sequence
  SAMD9L targeting guide sequence portion
ccacagcuggcuaucuuugu

SEQ ID NO: 15127 - RNA, 20 nt, Artificial Sequence
  SAMD9L targeting guide sequence portion
ccacuucuaccuauccaguu

SEQ ID NO: 15128 - RNA, 20 nt, Artificial Sequence
  SAMD9L targeting guide sequence portion
ccagcuguggauuccuguuc

SEQ ID NO: 15129 - RNA, 20 nt, Artificial Sequence
  SAMD9L targeting guide sequence portion
ccaguuagcagcuauagcuu

SEQ ID NO: 15130 - RNA, 20 nt, Artificial Sequence
  SAMD9L targeting guide sequence portion
ccaguuucauuauuuuaaag

SEQ ID NO: 15131 - RNA, 20 nt, Artificial Sequence
  SAMD9L targeting guide sequence portion
ccauccuaauucauacccuu

SEQ ID NO: 15132 - RNA, 20 nt, Artificial Sequence
  SAMD9L targeting guide sequence portion
cccaacuuucaccaaguuaa

SEQ ID NO: 15133 - RNA, 20 nt, Artificial Sequence
  SAMD9L targeting guide sequence portion
cccacuucuaccuauccagu

SEQ ID NO: 15134 - RNA, 20 nt, Artificial Sequence
  SAMD9L targeting guide sequence portion
ccccaacuuucaccaaguua

SEQ ID NO: 15135 - RNA, 20 nt, Artificial Sequence
  SAMD9L targeting guide sequence portion
cccuuguuucuuaggugacu

SEQ ID NO: 15136 - RNA, 20 nt, Artificial Sequence
  SAMD9L targeting guide sequence portion
cccuuuuagcuuaacuuggu

SEQ ID NO: 15137 - RNA, 20 nt, Artificial Sequence
  SAMD9L targeting guide sequence portion
ccguagcauauaggaauauu

SEQ ID NO: 15138 - RNA, 20 nt, Artificial Sequence
  SAMD9L targeting guide sequence portion
ccuaagaaacaaggguauga

SEQ ID NO: 15139 - RNA, 20 nt, Artificial Sequence
  SAMD9L targeting guide sequence portion
ccuaauucauacccuuguuu

SEQ ID NO: 15140 - RNA, 20 nt, Artificial Sequence
  SAMD9L targeting guide sequence portion
ccuauaugcuacggaaacca

SEQ ID NO: 15141 - RNA, 20 nt, Artificial Sequence
  SAMD9L targeting guide sequence portion
ccuauccaguuucauuauuu

SEQ ID NO: 15142 - RNA, 20 nt, Artificial Sequence
  SAMD9L targeting guide sequence portion
ccucaacccacuucuaccua

SEQ ID NO: 15143 - RNA, 20 nt, Artificial Sequence
  SAMD9L targeting guide sequence portion
ccuguuccucaacccacuuc

SEQ ID NO: 15144 - RNA, 20 nt, Artificial Sequence
  SAMD9L targeting guide sequence portion
ccuuauaauaauucucccuu

SEQ ID NO: 15145 - RNA, 20 nt, Artificial Sequence
  SAMD9L targeting guide sequence portion
ccuuguuucuuaggugacuc

SEQ ID NO: 15146 - RNA, 20 nt, Artificial Sequence
  SAMD9L targeting guide sequence portion
ccuuuagcaauauuauacau

SEQ ID NO: 15147 - RNA, 20 nt, Artificial Sequence
  SAMD9L targeting guide sequence portion
ccuuuuagccuuauaauaau

SEQ ID NO: 15148 - RNA, 20 nt, Artificial Sequence
  SAMD9L targeting guide sequence portion
ccuuuuagcuuaacuuggug

SEQ ID NO: 15149 - RNA, 20 nt, Artificial Sequence
  SAMD9L targeting guide sequence portion
cggaaaccaauuucuauguu

SEQ ID NO: 15150 - RNA, 20 nt, Artificial Sequence
  SAMD9L targeting guide sequence portion
cguagcauauaggaauauug

SEQ ID NO: 15151 - RNA, 20 nt, Artificial Sequence
  SAMD9L targeting guide sequence portion
cuaaaagggagaauuauuau

SEQ ID NO: 15152 - RNA, 20 nt, Artificial Sequence
  SAMD9L targeting guide sequence portion
cuaaaaggugugucaccagu

SEQ ID NO: 15153 - RNA, 20 nt, Artificial Sequence
  SAMD9L targeting guide sequence portion
cuaaaauacuuauuauauug

SEQ ID NO: 15154 - RNA, 20 nt, Artificial Sequence
  SAMD9L targeting guide sequence portion
cuaaaggcugacucuuaaaa

SEQ ID NO: 15155 - RNA, 20 nt, Artificial Sequence
  SAMD9L targeting guide sequence portion
cuaaaguaaguaucaagcag

SEQ ID NO: 15156 - RNA, 20 nt, Artificial Sequence
  SAMD9L targeting guide sequence portion
cuaacuggugacacaccuuu

SEQ ID NO: 15157 - RNA, 20 nt, Artificial Sequence
  SAMD9L targeting guide sequence portion
cuaagaaacaaggguaugaa

SEQ ID NO: 15158 - RNA, 20 nt, Artificial Sequence
  SAMD9L targeting guide sequence portion
cuaauucauacccuuguuuc

SEQ ID NO: 15159 - RNA, 20 nt, Artificial Sequence
  SAMD9L targeting guide sequence portion
cuaauuguaauuaugaaaua

SEQ ID NO: 15160 - RNA, 20 nt, Artificial Sequence
  SAMD9L targeting guide sequence portion
cuaccuauccaguuucauua

SEQ ID NO: 15161 - RNA, 20 nt, Artificial Sequence
  SAMD9L targeting guide sequence portion
cuacggaaaccaauuucuau

SEQ ID NO: 15162 - RNA, 20 nt, Artificial Sequence
  SAMD9L targeting guide sequence portion
cuauagcugcuaacugguga

SEQ ID NO: 15163 - RNA, 20 nt, Artificial Sequence
  SAMD9L targeting guide sequence portion
cuauagcuuauuucauaauu

SEQ ID NO: 15164 - RNA, 20 nt, Artificial Sequence
  SAMD9L targeting guide sequence portion
cuauaugcuacggaaaccaa

SEQ ID NO: 15165 - RNA, 20 nt, Artificial Sequence
  SAMD9L targeting guide sequence portion
cuauccaguuucauuauuuu

SEQ ID NO: 15166 - RNA, 20 nt, Artificial Sequence
  SAMD9L targeting guide sequence portion
cuaucuuuguuacauaguaa

SEQ ID NO: 15167 - RNA, 20 nt, Artificial Sequence
  SAMD9L targeting guide sequence portion
cuauguaacaaagauagcca

SEQ ID NO: 15168 - RNA, 20 nt, Artificial Sequence
  SAMD9L targeting guide sequence portion
cuaugugauuuuaaaaauaa

SEQ ID NO: 15169 - RNA, 20 nt, Artificial Sequence
  SAMD9L targeting guide sequence portion
cuauguuacuuaagauucug

SEQ ID NO: 15170 - RNA, 20 nt, Artificial Sequence
  SAMD9L targeting guide sequence portion
cuauuuuaccauccuaauuc

SEQ ID NO: 15171 - RNA, 20 nt, Artificial Sequence
  SAMD9L targeting guide sequence portion
cucaacccacuucuaccuau

SEQ ID NO: 15172 - RNA, 20 nt, Artificial Sequence
  SAMD9L targeting guide sequence portion
cucccuuuuagcuuaacuug

SEQ ID NO: 15173 - RNA, 20 nt, Artificial Sequence
  SAMD9L targeting guide sequence portion
cucuaauuguaauuaugaaa

SEQ ID NO: 15174 - RNA, 20 nt, Artificial Sequence
  SAMD9L targeting guide sequence portion
cucuguuacuauguaacaaa

SEQ ID NO: 15175 - RNA, 20 nt, Artificial Sequence
  SAMD9L targeting guide sequence portion
cucuuaaaacugcuugauac

SEQ ID NO: 15176 - RNA, 20 nt, Artificial Sequence
  SAMD9L targeting guide sequence portion
cugacucuuaaaacugcuug

SEQ ID NO: 15177 - RNA, 20 nt, Artificial Sequence
  SAMD9L targeting guide sequence portion
cugagacaaagcaauauaau

SEQ ID NO: 15178 - RNA, 20 nt, Artificial Sequence
  SAMD9L targeting guide sequence portion
cugcuaacuggugacacacc

SEQ ID NO: 15179 - RNA, 20 nt, Artificial Sequence
  SAMD9L targeting guide sequence portion
cugcucuguuacuauguaac

SEQ ID NO: 15180 - RNA, 20 nt, Artificial Sequence
  SAMD9L targeting guide sequence portion
cugcuugauacuuacuuuag

SEQ ID NO: 15181 - RNA, 20 nt, Artificial Sequence
  SAMD9L targeting guide sequence portion
cugcuuuuaagucacaaaac

SEQ ID NO: 15182 - RNA, 20 nt, Artificial Sequence
  SAMD9L targeting guide sequence portion
cuggauagguagaagugggu

SEQ ID NO: 15183 - RNA, 20 nt, Artificial Sequence
  SAMD9L targeting guide sequence portion
cuggcuaucuuuguuacaua

SEQ ID NO: 15184 - RNA, 20 nt, Artificial Sequence
  SAMD9L targeting guide sequence portion
cuggugacacaccuuuuagc

SEQ ID NO: 15185 - RNA, 20 nt, Artificial Sequence
  SAMD9L targeting guide sequence portion
cuguaugauaauguauacau

SEQ ID NO: 15186 - RNA, 20 nt, Artificial Sequence
  SAMD9L targeting guide sequence portion
cuguggauuccuguuccuca

SEQ ID NO: 15187 - RNA, 20 nt, Artificial Sequence
  SAMD9L targeting guide sequence portion
cuguuacuauguaacaaaga

SEQ ID NO: 15188 - RNA, 20 nt, Artificial Sequence
  SAMD9L targeting guide sequence portion
cuguuccucaacccacuucu

SEQ ID NO: 15189 - RNA, 20 nt, Artificial Sequence
  SAMD9L targeting guide sequence portion
cuguuuucuuuuggaacuca

SEQ ID NO: 15190 - RNA, 20 nt, Artificial Sequence
  SAMD9L targeting guide sequence portion
cuuaaaacugcuugauacuu

SEQ ID NO: 15191 - RNA, 20 nt, Artificial Sequence
  SAMD9L targeting guide sequence portion
cuuaaaagcagaaucuuaag

SEQ ID NO: 15192 - RNA, 20 nt, Artificial Sequence
  SAMD9L targeting guide sequence portion
cuuaacuuggugaaaguugg

SEQ ID NO: 15193 - RNA, 20 nt, Artificial Sequence
  SAMD9L targeting guide sequence portion
cuuaagauucugcuuuuaag

SEQ ID NO: 15194 - RNA, 20 nt, Artificial Sequence
  SAMD9L targeting guide sequence portion
cuuaaguaacauagaaauug

SEQ ID NO: 15195 - RNA, 20 nt, Artificial Sequence
  SAMD9L targeting guide sequence portion
cuuacuuuagcuauuuuacc

SEQ ID NO: 15196 - RNA, 20 nt, Artificial Sequence
  SAMD9L targeting guide sequence portion
cuuaggugacucuaauugua

SEQ ID NO: 15197 - RNA, 20 nt, Artificial Sequence
  SAMD9L targeting guide sequence portion
cuuauaauaauucucccuuu

SEQ ID NO: 15198 - RNA, 20 nt, Artificial Sequence
  SAMD9L targeting guide sequence portion
cuuauuucauaauuacaauu

SEQ ID NO: 15199 - RNA, 20 nt, Artificial Sequence
  SAMD9L targeting guide sequence portion
cuucuaccuauccaguuuca

SEQ ID NO: 15200 - RNA, 20 nt, Artificial Sequence
  SAMD9L targeting guide sequence portion
cuucuguaugauaauguaua

SEQ ID NO: 15201 - RNA, 20 nt, Artificial Sequence
  SAMD9L targeting guide sequence portion
cuugaguuccaaaagaaaac

SEQ ID NO: 15202 - RNA, 20 nt, Artificial Sequence
  SAMD9L targeting guide sequence portion
cuugauacuuacuuuagcua

SEQ ID NO: 15203 - RNA, 20 nt, Artificial Sequence
  SAMD9L targeting guide sequence portion
cuuggugaaaguugggguuu

SEQ ID NO: 15204 - RNA, 20 nt, Artificial Sequence
  SAMD9L targeting guide sequence portion
cuuguuucuuaggugacucu

SEQ ID NO: 15205 - RNA, 20 nt, Artificial Sequence
  SAMD9L targeting guide sequence portion
cuuuaaaauaaugaaacugg

SEQ ID NO: 15206 - RNA, 20 nt, Artificial Sequence
  SAMD9L targeting guide sequence portion
cuuuagcaauauuauacaua

SEQ ID NO: 15207 - RNA, 20 nt, Artificial Sequence
  SAMD9L targeting guide sequence portion
cuuuagcuauuuuaccaucc

SEQ ID NO: 15208 - RNA, 20 nt, Artificial Sequence
  SAMD9L targeting guide sequence portion
cuuuauuuuuaaaaucacau

SEQ ID NO: 15209 - RNA, 20 nt, Artificial Sequence
  SAMD9L targeting guide sequence portion
cuuucaccaaguuaagcuaa

SEQ ID NO: 15210 - RNA, 20 nt, Artificial Sequence
  SAMD9L targeting guide sequence portion
cuuuguuacauaguaacaga

SEQ ID NO: 15211 - RNA, 20 nt, Artificial Sequence
  SAMD9L targeting guide sequence portion
cuuuuaagucacaaaacccc

SEQ ID NO: 15212 - RNA, 20 nt, Artificial Sequence
  SAMD9L targeting guide sequence portion
cuuuuagccuuauaauaauu

SEQ ID NO: 15213 - RNA, 20 nt, Artificial Sequence
  SAMD9L targeting guide sequence portion
cuuuuagcuuaacuugguga

SEQ ID NO: 15214 - RNA, 20 nt, Artificial Sequence
  SAMD9L targeting guide sequence portion
gaaaacagauuauuuaacca

SEQ ID NO: 15215 - RNA, 20 nt, Artificial Sequence
  SAMD9L targeting guide sequence portion
gaaacaaggguaugaauuag

SEQ ID NO: 15216 - RNA, 20 nt, Artificial Sequence
  SAMD9L targeting guide sequence portion
gaaaccaauuucuauguuac

SEQ ID NO: 15217 - RNA, 20 nt, Artificial Sequence
  SAMD9L targeting guide sequence portion
gaaacuggauagguagaagu

SEQ ID NO: 15218 - RNA, 20 nt, Artificial Sequence
  SAMD9L targeting guide sequence portion
gaaaguugggguuuugugac

SEQ ID NO: 15219 - RNA, 20 nt, Artificial Sequence
  SAMD9L targeting guide sequence portion
gaaauaagcuauagcugcua

SEQ ID NO: 15220 - RNA, 20 nt, Artificial Sequence
  SAMD9L targeting guide sequence portion
gaaauugguuuccguagcau

SEQ ID NO: 15221 - RNA, 20 nt, Artificial Sequence
  SAMD9L targeting guide sequence portion
gaacaggaauccacagcugg

SEQ ID NO: 15222 - RNA, 20 nt, Artificial Sequence
  SAMD9L targeting guide sequence portion
gaagauacauauauauaugu

SEQ ID NO: 15223 - RNA, 20 nt, Artificial Sequence
  SAMD9L targeting guide sequence portion
gaaguggguugaggaacagg

SEQ ID NO: 15224 - RNA, 20 nt, Artificial Sequence
  SAMD9L targeting guide sequence portion
gaauauugcaaauaaacuuu

SEQ ID NO: 15225 - RNA, 20 nt, Artificial Sequence
  SAMD9L targeting guide sequence portion
gaauccacagcuggcuaucu

SEQ ID NO: 15226 - RNA, 20 nt, Artificial Sequence
  SAMD9L targeting guide sequence portion
gaaucuuaaguaacauagaa

SEQ ID NO: 15227 - RNA, 20 nt, Artificial Sequence
  SAMD9L targeting guide sequence portion
gaauuaggaugguaaaauag

SEQ ID NO: 15228 - RNA, 20 nt, Artificial Sequence
  SAMD9L targeting guide sequence portion
gaauuauacuuuauuuuuaa

SEQ ID NO: 15229 - RNA, 20 nt, Artificial Sequence
  SAMD9L targeting guide sequence portion
gaauuauuauaaggcuaaaa

SEQ ID NO: 15230 - RNA, 20 nt, Artificial Sequence
  SAMD9L targeting guide sequence portion
gacaaagcaauauaauaagu

SEQ ID NO: 15231 - RNA, 20 nt, Artificial Sequence
  SAMD9L targeting guide sequence portion
gacaauuauguauacauuau

SEQ ID NO: 15232 - RNA, 20 nt, Artificial Sequence
  SAMD9L targeting guide sequence portion
gacacaccuuuuagccuuau

SEQ ID NO: 15233 - RNA, 20 nt, Artificial Sequence
  SAMD9L targeting guide sequence portion
gacucuaauuguaauuauga

SEQ ID NO: 15234 - RNA, 20 nt, Artificial Sequence
  SAMD9L targeting guide sequence portion
gacucuuaaaacugcuugau

SEQ ID NO: 15235 - RNA, 20 nt, Artificial Sequence
  SAMD9L targeting guide sequence portion
gacuuaaaagcagaaucuua

SEQ ID NO: 15236 - RNA, 20 nt, Artificial Sequence
  SAMD9L targeting guide sequence portion
gagaauuauuauaaggcuaa

SEQ ID NO: 15237 - RNA, 20 nt, Artificial Sequence
  SAMD9L targeting guide sequence portion
gagacaaagcaauauaauaa

SEQ ID NO: 15238 - RNA, 20 nt, Artificial Sequence
  SAMD9L targeting guide sequence portion
gagcaguugguuaaauaauc

SEQ ID NO: 15239 - RNA, 20 nt, Artificial Sequence
  SAMD9L targeting guide sequence portion
gaggaacaggaauccacagc

SEQ ID NO: 15240 - RNA, 20 nt, Artificial Sequence
  SAMD9L targeting guide sequence portion
gagucaccuaagaaacaagg

SEQ ID NO: 15241 - RNA, 20 nt, Artificial Sequence
  SAMD9L targeting guide sequence portion
gagucagccuuuagcaauau

SEQ ID NO: 15242 - RNA, 20 nt, Artificial Sequence
  SAMD9L targeting guide sequence portion
gaguuccaaaagaaaacaga

SEQ ID NO: 15243 - RNA, 20 nt, Artificial Sequence
  SAMD9L targeting guide sequence portion
gauaauguauacauaauugu

SEQ ID NO: 15244 - RNA, 20 nt, Artificial Sequence
  SAMD9L targeting guide sequence portion
gauacauauauauauguaua

SEQ ID NO: 15245 - RNA, 20 nt, Artificial Sequence
  SAMD9L targeting guide sequence portion
gauacuuacuuuagcuauuu

SEQ ID NO: 15246 - RNA, 20 nt, Artificial Sequence
  SAMD9L targeting guide sequence portion
gauagccagcuguggauucc

SEQ ID NO: 15247 - RNA, 20 nt, Artificial Sequence
  SAMD9L targeting guide sequence portion
gauagguagaaguggguuga

SEQ ID NO: 15248 - RNA, 20 nt, Artificial Sequence
  SAMD9L targeting guide sequence portion
gaugguaaaauagcuaaagu

SEQ ID NO: 15249 - RNA, 20 nt, Artificial Sequence
  SAMD9L targeting guide sequence portion
gauuauuuaaccaacugcuc

SEQ ID NO: 15250 - RNA, 20 nt, Artificial Sequence
  SAMD9L targeting guide sequence portion
gauuccuguuccucaaccca

SEQ ID NO: 15251 - RNA, 20 nt, Artificial Sequence
  SAMD9L targeting guide sequence portion
gauucugcuuuuaagucaca

SEQ ID NO: 15252 - RNA, 20 nt, Artificial Sequence
  SAMD9L targeting guide sequence portion
gauuuuaaaaauaaaguaua

SEQ ID NO: 15253 - RNA, 20 nt, Artificial Sequence
  SAMD9L targeting guide sequence portion
gcaaauaaacuuuaaaauaa

SEQ ID NO: 15254 - RNA, 20 nt, Artificial Sequence
  SAMD9L targeting guide sequence portion
gcaauauaauaaguauuuua

SEQ ID NO: 15255 - RNA, 20 nt, Artificial Sequence
  SAMD9L targeting guide sequence portion
gcaauauuauacauauauau

SEQ ID NO: 15256 - RNA, 20 nt, Artificial Sequence
  SAMD9L targeting guide sequence portion
gcaauauuccuauaugcuac

SEQ ID NO: 15257 - RNA, 20 nt, Artificial Sequence
  SAMD9L targeting guide sequence portion
gcagaaucuuaaguaacaua

SEQ ID NO: 15258 - RNA, 20 nt, Artificial Sequence
  SAMD9L targeting guide sequence portion
gcagcuauagcuuauuucau

SEQ ID NO: 15259 - RNA, 20 nt, Artificial Sequence
  SAMD9L targeting guide sequence portion
gcaguugguuaaauaaucug

SEQ ID NO: 15260 - RNA, 20 nt, Artificial Sequence
  SAMD9L targeting guide sequence portion
gcaguuuuaagagucagccu

SEQ ID NO: 15261 - RNA, 20 nt, Artificial Sequence
  SAMD9L targeting guide sequence portion
gcauauaggaauauugcaaa

SEQ ID NO: 15262 - RNA, 20 nt, Artificial Sequence
  SAMD9L targeting guide sequence portion
gccagcuguggauuccuguu

SEQ ID NO: 15263 - RNA, 20 nt, Artificial Sequence
  SAMD9L targeting guide sequence portion
gccuuauaauaauucucccu

SEQ ID NO: 15264 - RNA, 20 nt, Artificial Sequence
  SAMD9L targeting guide sequence portion
gccuuuagcaauauuauaca

SEQ ID NO: 15265 - RNA, 20 nt, Artificial Sequence
  SAMD9L targeting guide sequence portion
gcuaaaagggagaauuauua

SEQ ID NO: 15266 - RNA, 20 nt, Artificial Sequence
  SAMD9L targeting guide sequence portion
gcuaaaaggugugucaccag

SEQ ID NO: 15267 - RNA, 20 nt, Artificial Sequence
  SAMD9L targeting guide sequence portion
gcuaaaggcugacucuuaaa

SEQ ID NO: 15268 - RNA, 20 nt, Artificial Sequence
  SAMD9L targeting guide sequence portion
gcuaaaguaaguaucaagca

SEQ ID NO: 15269 - RNA, 20 nt, Artificial Sequence
  SAMD9L targeting guide sequence portion
gcuaacuggugacacaccuu

SEQ ID NO: 15270 - RNA, 20 nt, Artificial Sequence
  SAMD9L targeting guide sequence portion
gcuacggaaaccaauuucua

SEQ ID NO: 15271 - RNA, 20 nt, Artificial Sequence
  SAMD9L targeting guide sequence portion
gcuauagcugcuaacuggug

SEQ ID NO: 15272 - RNA, 20 nt, Artificial Sequence
  SAMD9L targeting guide sequence portion
gcuauagcuuauuucauaau

SEQ ID NO: 15273 - RNA, 20 nt, Artificial Sequence
  SAMD9L targeting guide sequence portion
gcuaucuuuguuacauagua

SEQ ID NO: 15274 - RNA, 20 nt, Artificial Sequence
  SAMD9L targeting guide sequence portion
gcuauuuuaccauccuaauu

SEQ ID NO: 15275 - RNA, 20 nt, Artificial Sequence
  SAMD9L targeting guide sequence portion
gcucuguuacuauguaacaa

SEQ ID NO: 15276 - RNA, 20 nt, Artificial Sequence
  SAMD9L targeting guide sequence portion
gcugacucuuaaaacugcuu

SEQ ID NO: 15277 - RNA, 20 nt, Artificial Sequence
  SAMD9L targeting guide sequence portion
gcugcuaacuggugacacac

SEQ ID NO: 15278 - RNA, 20 nt, Artificial Sequence
  SAMD9L targeting guide sequence portion
gcuggcuaucuuuguuacau

SEQ ID NO: 15279 - RNA, 20 nt, Artificial Sequence
  SAMD9L targeting guide sequence portion
gcuguggauuccuguuccuc

SEQ ID NO: 15280 - RNA, 20 nt, Artificial Sequence
  SAMD9L targeting guide sequence portion
gcuuaacuuggugaaaguug

SEQ ID NO: 15281 - RNA, 20 nt, Artificial Sequence
  SAMD9L targeting guide sequence portion
gcuuauuucauaauuacaau

SEQ ID NO: 15282 - RNA, 20 nt, Artificial Sequence
  SAMD9L targeting guide sequence portion
gcuugaguuccaaaagaaaa

SEQ ID NO: 15283 - RNA, 20 nt, Artificial Sequence
  SAMD9L targeting guide sequence portion
gcuugauacuuacuuuagcu

SEQ ID NO: 15284 - RNA, 20 nt, Artificial Sequence
  SAMD9L targeting guide sequence portion
gcuuuuaagucacaaaaccc

SEQ ID NO: 15285 - RNA, 20 nt, Artificial Sequence
  SAMD9L targeting guide sequence portion
ggaaaccaauuucuauguua

SEQ ID NO: 15286 - RNA, 20 nt, Artificial Sequence
  SAMD9L targeting guide sequence portion
ggaacaggaauccacagcug

SEQ ID NO: 15287 - RNA, 20 nt, Artificial Sequence
  SAMD9L targeting guide sequence portion
ggaauauugcaaauaaacuu

SEQ ID NO: 15288 - RNA, 20 nt, Artificial Sequence
  SAMD9L targeting guide sequence portion
ggaauccacagcuggcuauc

SEQ ID NO: 15289 - RNA, 20 nt, Artificial Sequence
  SAMD9L targeting guide sequence portion
ggagaauuauuauaaggcua

SEQ ID NO: 15290 - RNA, 20 nt, Artificial Sequence
  SAMD9L targeting guide sequence portion
ggauagguagaaguggguug

SEQ ID NO: 15291 - RNA, 20 nt, Artificial Sequence
  SAMD9L targeting guide sequence portion
ggaugguaaaauagcuaaag

SEQ ID NO: 15292 - RNA, 20 nt, Artificial Sequence
  SAMD9L targeting guide sequence portion
ggauuccuguuccucaaccc

SEQ ID NO: 15293 - RNA, 20 nt, Artificial Sequence
  SAMD9L targeting guide sequence portion
ggcuaaaaggugugucacca

SEQ ID NO: 15294 - RNA, 20 nt, Artificial Sequence
  SAMD9L targeting guide sequence portion
ggcuaucuuuguuacauagu

SEQ ID NO: 15295 - RNA, 20 nt, Artificial Sequence
  SAMD9L targeting guide sequence portion
ggcugacucuuaaaacugcu

SEQ ID NO: 15296 - RNA, 20 nt, Artificial Sequence
  SAMD9L targeting guide sequence portion
gggagaauuauuauaaggcu

SEQ ID NO: 15297 - RNA, 20 nt, Artificial Sequence
  SAMD9L targeting guide sequence portion
gggguuuugugacuuaaaag

SEQ ID NO: 15298 - RNA, 20 nt, Artificial Sequence
  SAMD9L targeting guide sequence portion
ggguaugaauuaggauggua

SEQ ID NO: 15299 - RNA, 20 nt, Artificial Sequence
  SAMD9L targeting guide sequence portion
ggguugaggaacaggaaucc

SEQ ID NO: 15300 - RNA, 20 nt, Artificial Sequence
  SAMD9L targeting guide sequence portion
ggguuuugugacuuaaaagc

SEQ ID NO: 15301 - RNA, 20 nt, Artificial Sequence
  SAMD9L targeting guide sequence portion
gguaaaauagcuaaaguaag

SEQ ID NO: 15302 - RNA, 20 nt, Artificial Sequence
  SAMD9L targeting guide sequence portion
gguagaaguggguugaggaa

SEQ ID NO: 15303 - RNA, 20 nt, Artificial Sequence
  SAMD9L targeting guide sequence portion
gguaugaauuaggaugguaa

SEQ ID NO: 15304 - RNA, 20 nt, Artificial Sequence
  SAMD9L targeting guide sequence portion
ggugaaaguugggguuuugu

SEQ ID NO: 15305 - RNA, 20 nt, Artificial Sequence
  SAMD9L targeting guide sequence portion
ggugacacaccuuuuagccu

SEQ ID NO: 15306 - RNA, 20 nt, Artificial Sequence
  SAMD9L targeting guide sequence portion
ggugacucuaauuguaauua

SEQ ID NO: 15307 - RNA, 20 nt, Artificial Sequence
  SAMD9L targeting guide sequence portion
ggugugucaccaguuagcag

SEQ ID NO: 15308 - RNA, 20 nt, Artificial Sequence
  SAMD9L targeting guide sequence portion
gguuaaauaaucuguuuucu

SEQ ID NO: 15309 - RNA, 20 nt, Artificial Sequence
  SAMD9L targeting guide sequence portion
gguugaggaacaggaaucca

SEQ ID NO: 15310 - RNA, 20 nt, Artificial Sequence
  SAMD9L targeting guide sequence portion
gguuuccguagcauauagga

SEQ ID NO: 15311 - RNA, 20 nt, Artificial Sequence
  SAMD9L targeting guide sequence portion
gguuuugugacuuaaaagca

SEQ ID NO: 15312 - RNA, 20 nt, Artificial Sequence
  SAMD9L targeting guide sequence portion
guaaaauagcuaaaguaagu

SEQ ID NO: 15313 - RNA, 20 nt, Artificial Sequence
  SAMD9L targeting guide sequence portion
guaacaaagauagccagcug

SEQ ID NO: 15314 - RNA, 20 nt, Artificial Sequence
  SAMD9L targeting guide sequence portion
guaacagagcaguugguuaa

SEQ ID NO: 15315 - RNA, 20 nt, Artificial Sequence
  SAMD9L targeting guide sequence portion
guaacauagaaauugguuuc

SEQ ID NO: 15316 - RNA, 20 nt, Artificial Sequence
  SAMD9L targeting guide sequence portion
guaaguaucaagcaguuuua

SEQ ID NO: 15317 - RNA, 20 nt, Artificial Sequence
  SAMD9L targeting guide sequence portion
guaauuaugaaauaagcuau

SEQ ID NO: 15318 - RNA, 20 nt, Artificial Sequence
  SAMD9L targeting guide sequence portion
guagaaguggguugaggaac

SEQ ID NO: 15319 - RNA, 20 nt, Artificial Sequence
  SAMD9L targeting guide sequence portion
guagcauauaggaauauugc

SEQ ID NO: 15320 - RNA, 20 nt, Artificial Sequence
  SAMD9L targeting guide sequence portion
guauaauauugcuaaaggcu

SEQ ID NO: 15321 - RNA, 20 nt, Artificial Sequence
  SAMD9L targeting guide sequence portion
guauaauucuaaaauacuua

SEQ ID NO: 15322 - RNA, 20 nt, Artificial Sequence
  SAMD9L targeting guide sequence portion
guauacauaauugucuaugu

SEQ ID NO: 15323 - RNA, 20 nt, Artificial Sequence
  SAMD9L targeting guide sequence portion
guauacauuaucauacagaa

SEQ ID NO: 15324 - RNA, 20 nt, Artificial Sequence
  SAMD9L targeting guide sequence portion
guaucaagcaguuuuaagag

SEQ ID NO: 15325 - RNA, 20 nt, Artificial Sequence
  SAMD9L targeting guide sequence portion
guaucuucuguaugauaaug

SEQ ID NO: 15326 - RNA, 20 nt, Artificial Sequence
  SAMD9L targeting guide sequence portion
guaugaauuaggaugguaaa

SEQ ID NO: 15327 - RNA, 20 nt, Artificial Sequence
  SAMD9L targeting guide sequence portion
guaugauaauguauacauaa

SEQ ID NO: 15328 - RNA, 20 nt, Artificial Sequence
  SAMD9L targeting guide sequence portion
guauuuuagaauuauacuuu

SEQ ID NO: 15329 - RNA, 20 nt, Artificial Sequence
  SAMD9L targeting guide sequence portion
gucacaaaaccccaacuuuc

SEQ ID NO: 15330 - RNA, 20 nt, Artificial Sequence
  SAMD9L targeting guide sequence portion
gucaccaguuagcagcuaua

SEQ ID NO: 15331 - RNA, 20 nt, Artificial Sequence
  SAMD9L targeting guide sequence portion
gucaccuaagaaacaagggu

SEQ ID NO: 15332 - RNA, 20 nt, Artificial Sequence
  SAMD9L targeting guide sequence portion
gucagccuuuagcaauauua

SEQ ID NO: 15333 - RNA, 20 nt, Artificial Sequence
  SAMD9L targeting guide sequence portion
gucuaugugauuuuaaaaau

SEQ ID NO: 15334 - RNA, 20 nt, Artificial Sequence
  SAMD9L targeting guide sequence portion
gugaaaguugggguuuugug

SEQ ID NO: 15335 - RNA, 20 nt, Artificial Sequence
  SAMD9L targeting guide sequence portion
gugacacaccuuuuagccuu

SEQ ID NO: 15336 - RNA, 20 nt, Artificial Sequence
  SAMD9L targeting guide sequence portion
gugacucuaauuguaauuau

SEQ ID NO: 15337 - RNA, 20 nt, Artificial Sequence
  SAMD9L targeting guide sequence portion
gugacuuaaaagcagaaucu

SEQ ID NO: 15338 - RNA, 20 nt, Artificial Sequence
  SAMD9L targeting guide sequence portion
gugauuuuaaaaauaaagua

SEQ ID NO: 15339 - RNA, 20 nt, Artificial Sequence
  SAMD9L targeting guide sequence portion
guggauuccuguuccucaac

SEQ ID NO: 15340 - RNA, 20 nt, Artificial Sequence
  SAMD9L targeting guide sequence portion
guggguugaggaacaggaau

SEQ ID NO: 15341 - RNA, 20 nt, Artificial Sequence
  SAMD9L targeting guide sequence portion
gugucaccaguuagcagcua

SEQ ID NO: 15342 - RNA, 20 nt, Artificial Sequence
  SAMD9L targeting guide sequence portion
gugugucaccaguuagcagc

SEQ ID NO: 15343 - RNA, 20 nt, Artificial Sequence
  SAMD9L targeting guide sequence portion
guuaaauaaucuguuuucuu

SEQ ID NO: 15344 - RNA, 20 nt, Artificial Sequence
  SAMD9L targeting guide sequence portion
guuaagcuaaaagggagaau

SEQ ID NO: 15345 - RNA, 20 nt, Artificial Sequence
  SAMD9L targeting guide sequence portion
guuacauaguaacagagcag

SEQ ID NO: 15346 - RNA, 20 nt, Artificial Sequence
  SAMD9L targeting guide sequence portion
guuacuauguaacaaagaua

SEQ ID NO: 15347 - RNA, 20 nt, Artificial Sequence
  SAMD9L targeting guide sequence portion
guuacuuaagauucugcuuu

SEQ ID NO: 15348 - RNA, 20 nt, Artificial Sequence
  SAMD9L targeting guide sequence portion
guuagcagcuauagcuuauu

SEQ ID NO: 15349 - RNA, 20 nt, Artificial Sequence
  SAMD9L targeting guide sequence portion
guuccaaaagaaaacagauu

SEQ ID NO: 15350 - RNA, 20 nt, Artificial Sequence
  SAMD9L targeting guide sequence portion
guuccucaacccacuucuac

SEQ ID NO: 15351 - RNA, 20 nt, Artificial Sequence
  SAMD9L targeting guide sequence portion
guugaggaacaggaauccac

SEQ ID NO: 15352 - RNA, 20 nt, Artificial Sequence
  SAMD9L targeting guide sequence portion
guugggguuuugugacuuaa

SEQ ID NO: 15353 - RNA, 20 nt, Artificial Sequence
  SAMD9L targeting guide sequence portion
guugguuaaauaaucuguuu

SEQ ID NO: 15354 - RNA, 20 nt, Artificial Sequence
  SAMD9L targeting guide sequence portion
guuuauuugcaauauuccua

SEQ ID NO: 15355 - RNA, 20 nt, Artificial Sequence
  SAMD9L targeting guide sequence portion
guuucauuauuuuaaaguuu

SEQ ID NO: 15356 - RNA, 20 nt, Artificial Sequence
  SAMD9L targeting guide sequence portion
guuuccguagcauauaggaa

SEQ ID NO: 15357 - RNA, 20 nt, Artificial Sequence
  SAMD9L targeting guide sequence portion
guuucuuaggugacucuaau

SEQ ID NO: 15358 - RNA, 20 nt, Artificial Sequence
  SAMD9L targeting guide sequence portion
guuuuaagagucagccuuua

SEQ ID NO: 15359 - RNA, 20 nt, Artificial Sequence
  SAMD9L targeting guide sequence portion
guuuugugacuuaaaagcag

SEQ ID NO: 15360 - RNA, 20 nt, Artificial Sequence
  SAMD9L targeting guide sequence portion
uaaaaauaaaguauaauucu

SEQ ID NO: 15361 - RNA, 20 nt, Artificial Sequence
  SAMD9L targeting guide sequence portion
uaaaacugcuugauacuuac

SEQ ID NO: 15362 - RNA, 20 nt, Artificial Sequence
  SAMD9L targeting guide sequence portion
uaaaagcagaaucuuaagua

SEQ ID NO: 15363 - RNA, 20 nt, Artificial Sequence
  SAMD9L targeting guide sequence portion
uaaaaggugugucaccaguu

SEQ ID NO: 15364 - RNA, 20 nt, Artificial Sequence
  SAMD9L targeting guide sequence portion
uaaaauaaugaaacuggaua

SEQ ID NO: 15365 - RNA, 20 nt, Artificial Sequence
  SAMD9L targeting guide sequence portion
uaaaauacuuauuauauugc

SEQ ID NO: 15366 - RNA, 20 nt, Artificial Sequence
  SAMD9L targeting guide sequence portion
uaaaauagcuaaaguaagua

SEQ ID NO: 15367 - RNA, 20 nt, Artificial Sequence
  SAMD9L targeting guide sequence portion
uaaaaucacauagacaauua

SEQ ID NO: 15368 - RNA, 20 nt, Artificial Sequence
  SAMD9L targeting guide sequence portion
uaaacuuuaaaauaaugaaa

SEQ ID NO: 15369 - RNA, 20 nt, Artificial Sequence
  SAMD9L targeting guide sequence portion
uaaaggcugacucuuaaaac

SEQ ID NO: 15370 - RNA, 20 nt, Artificial Sequence
  SAMD9L targeting guide sequence portion
uaaaguaaguaucaagcagu

SEQ ID NO: 15371 - RNA, 20 nt, Artificial Sequence
  SAMD9L targeting guide sequence portion
uaaaguauaauucuaaaaua

SEQ ID NO: 15372 - RNA, 20 nt, Artificial Sequence
  SAMD9L targeting guide sequence portion
uaaaguuuauuugcaauauu

SEQ ID NO: 15373 - RNA, 20 nt, Artificial Sequence
  SAMD9L targeting guide sequence portion
uaaauaaucuguuuucuuuu

SEQ ID NO: 15374 - RNA, 20 nt, Artificial Sequence
  SAMD9L targeting guide sequence portion
uaacaaagauagccagcugu

SEQ ID NO: 15375 - RNA, 20 nt, Artificial Sequence
  SAMD9L targeting guide sequence portion
uaacagagcaguugguuaaa

SEQ ID NO: 15376 - RNA, 20 nt, Artificial Sequence
  SAMD9L targeting guide sequence portion
uaacauagaaauugguuucc

SEQ ID NO: 15377 - RNA, 20 nt, Artificial Sequence
  SAMD9L targeting guide sequence portion
uaaccaacugcucuguuacu

SEQ ID NO: 15378 - RNA, 20 nt, Artificial Sequence
  SAMD9L targeting guide sequence portion
uaacuggugacacaccuuuu

SEQ ID NO: 15379 - RNA, 20 nt, Artificial Sequence
  SAMD9L targeting guide sequence portion
uaacuuggugaaaguugggg

SEQ ID NO: 15380 - RNA, 20 nt, Artificial Sequence
  SAMD9L targeting guide sequence portion
uaagaaacaaggguaugaau

SEQ ID NO: 15381 - RNA, 20 nt, Artificial Sequence
  SAMD9L targeting guide sequence portion
uaagagucagccuuuagcaa

SEQ ID NO: 15382 - RNA, 20 nt, Artificial Sequence
  SAMD9L targeting guide sequence portion
uaagauucugcuuuuaaguc

SEQ ID NO: 15383 - RNA, 20 nt, Artificial Sequence
  SAMD9L targeting guide sequence portion
uaagcuaaaagggagaauua

SEQ ID NO: 15384 - RNA, 20 nt, Artificial Sequence
  SAMD9L targeting guide sequence portion
uaagcuauagcugcuaacug

SEQ ID NO: 15385 - RNA, 20 nt, Artificial Sequence
  SAMD9L targeting guide sequence portion
uaaggcuaaaagguguguca

SEQ ID NO: 15386 - RNA, 20 nt, Artificial Sequence
  SAMD9L targeting guide sequence portion
uaaguaacauagaaauuggu

SEQ ID NO: 15387 - RNA, 20 nt, Artificial Sequence
  SAMD9L targeting guide sequence portion
uaaguaucaagcaguuuuaa

SEQ ID NO: 15388 - RNA, 20 nt, Artificial Sequence
  SAMD9L targeting guide sequence portion
uaaguauuuuagaauuauac

SEQ ID NO: 15389 - RNA, 20 nt, Artificial Sequence
  SAMD9L targeting guide sequence portion
uaagucacaaaaccccaacu

SEQ ID NO: 15390 - RNA, 20 nt, Artificial Sequence
  SAMD9L targeting guide sequence portion
uaauaaguauuuuagaauua

SEQ ID NO: 15391 - RNA, 20 nt, Artificial Sequence
  SAMD9L targeting guide sequence portion
uaauaauucucccuuuuagc

SEQ ID NO: 15392 - RNA, 20 nt, Artificial Sequence
  SAMD9L targeting guide sequence portion
uaauauugcuaaaggcugac

SEQ ID NO: 15393 - RNA, 20 nt, Artificial Sequence
  SAMD9L targeting guide sequence portion
uaaucuguuuucuuuuggaa

SEQ ID NO: 15394 - RNA, 20 nt, Artificial Sequence
  SAMD9L targeting guide sequence portion
uaaugaaacuggauagguag

SEQ ID NO: 15395 - RNA, 20 nt, Artificial Sequence
  SAMD9L targeting guide sequence portion
uaauguauacauaauugucu

SEQ ID NO: 15396 - RNA, 20 nt, Artificial Sequence
  SAMD9L targeting guide sequence portion
uaauuacaauuagagucacc

SEQ ID NO: 15397 - RNA, 20 nt, Artificial Sequence
  SAMD9L targeting guide sequence portion
uaauuaugaaauaagcuaua

SEQ ID NO: 15398 - RNA, 20 nt, Artificial Sequence
  SAMD9L targeting guide sequence portion
uaauucauacccuuguuucu

SEQ ID NO: 15399 - RNA, 20 nt, Artificial Sequence
  SAMD9L targeting guide sequence portion
uaauucuaaaauacuuauua

SEQ ID NO: 15400 - RNA, 20 nt, Artificial Sequence
  SAMD9L targeting guide sequence portion
uaauucucccuuuuagcuua

SEQ ID NO: 15401 - RNA, 20 nt, Artificial Sequence
  SAMD9L targeting guide sequence portion
uaauuguaauuaugaaauaa

SEQ ID NO: 15402 - RNA, 20 nt, Artificial Sequence
  SAMD9L targeting guide sequence portion
uaauugucuaugugauuuua

SEQ ID NO: 15403 - RNA, 20 nt, Artificial Sequence
  SAMD9L targeting guide sequence portion
uacaauuagagucaccuaag

SEQ ID NO: 15404 - RNA, 20 nt, Artificial Sequence
  SAMD9L targeting guide sequence portion
uacagaagauacauauauau

SEQ ID NO: 15405 - RNA, 20 nt, Artificial Sequence
  SAMD9L targeting guide sequence portion
uacauaauugucuaugugau

SEQ ID NO: 15406 - RNA, 20 nt, Artificial Sequence
  SAMD9L targeting guide sequence portion
uacauaguaacagagcaguu

SEQ ID NO: 15407 - RNA, 20 nt, Artificial Sequence
  SAMD9L targeting guide sequence portion
uacauauauauauguauaau

SEQ ID NO: 15408 - RNA, 20 nt, Artificial Sequence
  SAMD9L targeting guide sequence portion
uacauauauauauguaucuu

SEQ ID NO: 15409 - RNA, 20 nt, Artificial Sequence
  SAMD9L targeting guide sequence portion
uacauuaucauacagaagau

SEQ ID NO: 15410 - RNA, 20 nt, Artificial Sequence
  SAMD9L targeting guide sequence portion
uaccauccuaauucauaccc

SEQ ID NO: 15411 - RNA, 20 nt, Artificial Sequence
  SAMD9L targeting guide sequence portion
uacccuuguuucuuagguga

SEQ ID NO: 15412 - RNA, 20 nt, Artificial Sequence
  SAMD9L targeting guide sequence portion
uaccuauccaguuucauuau

SEQ ID NO: 15413 - RNA, 20 nt, Artificial Sequence
  SAMD9L targeting guide sequence portion
uacggaaaccaauuucuaug

SEQ ID NO: 15414 - RNA, 20 nt, Artificial Sequence
  SAMD9L targeting guide sequence portion
uacuauguaacaaagauagc

SEQ ID NO: 15415 - RNA, 20 nt, Artificial Sequence
  SAMD9L targeting guide sequence portion
uacuuaagauucugcuuuua

SEQ ID NO: 15416 - RNA, 20 nt, Artificial Sequence
  SAMD9L targeting guide sequence portion
uacuuacuuuagcuauuuua

SEQ ID NO: 15417 - RNA, 20 nt, Artificial Sequence
  SAMD9L targeting guide sequence portion
uacuuuagcuauuuuaccau

SEQ ID NO: 15418 - RNA, 20 nt, Artificial Sequence
  SAMD9L targeting guide sequence portion
uacuuuauuuuuaaaaucac

SEQ ID NO: 15419 - RNA, 20 nt, Artificial Sequence
  SAMD9L targeting guide sequence portion
uagaaauugguuuccguagc

SEQ ID NO: 15420 - RNA, 20 nt, Artificial Sequence
  SAMD9L targeting guide sequence portion
uagaaguggguugaggaaca

SEQ ID NO: 15421 - RNA, 20 nt, Artificial Sequence
  SAMD9L targeting guide sequence portion
uagaauuauacuuuauuuuu

SEQ ID NO: 15422 - RNA, 20 nt, Artificial Sequence
  SAMD9L targeting guide sequence portion
uagacaauuauguauacauu

SEQ ID NO: 15423 - RNA, 20 nt, Artificial Sequence
  SAMD9L targeting guide sequence portion
uagagucaccuaagaaacaa

SEQ ID NO: 15424 - RNA, 20 nt, Artificial Sequence
  SAMD9L targeting guide sequence portion
uagcaauauuauacauauau

SEQ ID NO: 15425 - RNA, 20 nt, Artificial Sequence
  SAMD9L targeting guide sequence portion
uagcagcuauagcuuauuuc

SEQ ID NO: 15426 - RNA, 20 nt, Artificial Sequence
  SAMD9L targeting guide sequence portion
uagcauauaggaauauugca

SEQ ID NO: 15427 - RNA, 20 nt, Artificial Sequence
  SAMD9L targeting guide sequence portion
uagccagcuguggauuccug

SEQ ID NO: 15428 - RNA, 20 nt, Artificial Sequence
  SAMD9L targeting guide sequence portion
uagcuaaaguaaguaucaag

SEQ ID NO: 15429 - RNA, 20 nt, Artificial Sequence
  SAMD9L targeting guide sequence portion
uagcuauuuuaccauccuaa

SEQ ID NO: 15430 - RNA, 20 nt, Artificial Sequence
  SAMD9L targeting guide sequence portion
uagcugcuaacuggugacac

SEQ ID NO: 15431 - RNA, 20 nt, Artificial Sequence
  SAMD9L targeting guide sequence portion
uagcuuaacuuggugaaagu

SEQ ID NO: 15432 - RNA, 20 nt, Artificial Sequence
  SAMD9L targeting guide sequence portion
uagcuuauuucauaauuaca

SEQ ID NO: 15433 - RNA, 20 nt, Artificial Sequence
  SAMD9L targeting guide sequence portion
uaggaauauugcaaauaaac

SEQ ID NO: 15434 - RNA, 20 nt, Artificial Sequence
  SAMD9L targeting guide sequence portion
uaggaugguaaaauagcuaa

SEQ ID NO: 15435 - RNA, 20 nt, Artificial Sequence
  SAMD9L targeting guide sequence portion
uagguagaaguggguugagg

SEQ ID NO: 15436 - RNA, 20 nt, Artificial Sequence
  SAMD9L targeting guide sequence portion
uaggugacucuaauuguaau

SEQ ID NO: 15437 - RNA, 20 nt, Artificial Sequence
  SAMD9L targeting guide sequence portion
uaguaacagagcaguugguu

SEQ ID NO: 15438 - RNA, 20 nt, Artificial Sequence
  SAMD9L targeting guide sequence portion
uauaaggcuaaaaggugugu

SEQ ID NO: 15439 - RNA, 20 nt, Artificial Sequence
  SAMD9L targeting guide sequence portion
uauaauaaguauuuuagaau

SEQ ID NO: 15440 - RNA, 20 nt, Artificial Sequence
  SAMD9L targeting guide sequence portion
uauaauaauucucccuuuua

SEQ ID NO: 15441 - RNA, 20 nt, Artificial Sequence
  SAMD9L targeting guide sequence portion
uauaauauugcuaaaggcug

SEQ ID NO: 15442 - RNA, 20 nt, Artificial Sequence
  SAMD9L targeting guide sequence portion
uauaauucuaaaauacuuau

SEQ ID NO: 15443 - RNA, 20 nt, Artificial Sequence
  SAMD9L targeting guide sequence portion
uauacauaauugucuaugug

SEQ ID NO: 15444 - RNA, 20 nt, Artificial Sequence
  SAMD9L targeting guide sequence portion
uauacauauauauauguauc

SEQ ID NO: 15445 - RNA, 20 nt, Artificial Sequence
  SAMD9L targeting guide sequence portion
uauacauuaucauacagaag

SEQ ID NO: 15446 - RNA, 20 nt, Artificial Sequence
  SAMD9L targeting guide sequence portion
uauacuuuauuuuuaaaauc

SEQ ID NO: 15447 - RNA, 20 nt, Artificial Sequence
  SAMD9L targeting guide sequence portion
uauagcugcuaacuggugac

SEQ ID NO: 15448 - RNA, 20 nt, Artificial Sequence
  SAMD9L targeting guide sequence portion
uauagcuuauuucauaauua

SEQ ID NO: 15449 - RNA, 20 nt, Artificial Sequence
  SAMD9L targeting guide sequence portion
uauaggaauauugcaaauaa

SEQ ID NO: 15450 - RNA, 20 nt, Artificial Sequence
  SAMD9L targeting guide sequence portion
uauauauauguauaauauug

SEQ ID NO: 15451 - RNA, 20 nt, Artificial Sequence
  SAMD9L targeting guide sequence portion
uauauauauguaucuucugu

SEQ ID NO: 15452 - RNA, 20 nt, Artificial Sequence
  SAMD9L targeting guide sequence portion
uauauauguauaauauugcu

SEQ ID NO: 15453 - RNA, 20 nt, Artificial Sequence
  SAMD9L targeting guide sequence portion
uauauauguaucuucuguau

SEQ ID NO: 15454 - RNA, 20 nt, Artificial Sequence
  SAMD9L targeting guide sequence portion
uauaugcuacggaaaccaau

SEQ ID NO: 15455 - RNA, 20 nt, Artificial Sequence
  SAMD9L targeting guide sequence portion
uauauguauaauauugcuaa

SEQ ID NO: 15456 - RNA, 20 nt, Artificial Sequence
  SAMD9L targeting guide sequence portion
uauauguaucuucuguauga

SEQ ID NO: 15457 - RNA, 20 nt, Artificial Sequence
  SAMD9L targeting guide sequence portion
uaucaagcaguuuuaagagu

SEQ ID NO: 15458 - RNA, 20 nt, Artificial Sequence
  SAMD9L targeting guide sequence portion
uaucauacagaagauacaua

SEQ ID NO: 15459 - RNA, 20 nt, Artificial Sequence
  SAMD9L targeting guide sequence portion
uauccaguuucauuauuuua

SEQ ID NO: 15460 - RNA, 20 nt, Artificial Sequence
  SAMD9L targeting guide sequence portion
uaucuucuguaugauaaugu

SEQ ID NO: 15461 - RNA, 20 nt, Artificial Sequence
  SAMD9L targeting guide sequence portion
uaucuuuguuacauaguaac

SEQ ID NO: 15462 - RNA, 20 nt, Artificial Sequence
  SAMD9L targeting guide sequence portion
uaugaaauaagcuauagcug

SEQ ID NO: 15463 - RNA, 20 nt, Artificial Sequence
  SAMD9L targeting guide sequence portion
uaugaauuaggaugguaaaa

SEQ ID NO: 15464 - RNA, 20 nt, Artificial Sequence
  SAMD9L targeting guide sequence portion
uaugauaauguauacauaau

SEQ ID NO: 15465 - RNA, 20 nt, Artificial Sequence
  SAMD9L targeting guide sequence portion
uaugcuacggaaaccaauuu

SEQ ID NO: 15466 - RNA, 20 nt, Artificial Sequence
  SAMD9L targeting guide sequence portion
uauguaacaaagauagccag

SEQ ID NO: 15467 - RNA, 20 nt, Artificial Sequence
  SAMD9L targeting guide sequence portion
uauguauaauauugcuaaag

SEQ ID NO: 15468 - RNA, 20 nt, Artificial Sequence
  SAMD9L targeting guide sequence portion
uauguauacauuaucauaca

SEQ ID NO: 15469 - RNA, 20 nt, Artificial Sequence
  SAMD9L targeting guide sequence portion
uauguaucuucuguaugaua

SEQ ID NO: 15470 - RNA, 20 nt, Artificial Sequence
  SAMD9L targeting guide sequence portion
uaugugauuuuaaaaauaaa

SEQ ID NO: 15471 - RNA, 20 nt, Artificial Sequence
  SAMD9L targeting guide sequence portion
uauguuacuuaagauucugc

SEQ ID NO: 15472 - RNA, 20 nt, Artificial Sequence
  SAMD9L targeting guide sequence portion
uauuauaaggcuaaaaggug

SEQ ID NO: 15473 - RNA, 20 nt, Artificial Sequence
  SAMD9L targeting guide sequence portion
uauuauacauauauauaugu

SEQ ID NO: 15474 - RNA, 20 nt, Artificial Sequence
  SAMD9L targeting guide sequence portion
uauuccuauaugcuacggaa

SEQ ID NO: 15475 - RNA, 20 nt, Artificial Sequence
  SAMD9L targeting guide sequence portion
uauugcaaauaaacuuuaaa

SEQ ID NO: 15476 - RNA, 20 nt, Artificial Sequence
  SAMD9L targeting guide sequence portion
uauugcuaaaggcugacucu

SEQ ID NO: 15477 - RNA, 20 nt, Artificial Sequence
  SAMD9L targeting guide sequence portion
uauuuaaccaacugcucugu

SEQ ID NO: 15478 - RNA, 20 nt, Artificial Sequence
  SAMD9L targeting guide sequence portion
uauuucauaauuacaauuag

SEQ ID NO: 15479 - RNA, 20 nt, Artificial Sequence
  SAMD9L targeting guide sequence portion
uauuugcaauauuccuauau

SEQ ID NO: 15480 - RNA, 20 nt, Artificial Sequence
  SAMD9L targeting guide sequence portion
uauuuuaaaguuuauuugca

SEQ ID NO: 15481 - RNA, 20 nt, Artificial Sequence
  SAMD9L targeting guide sequence portion
uauuuuaccauccuaauuca

SEQ ID NO: 15482 - RNA, 20 nt, Artificial Sequence
  SAMD9L targeting guide sequence portion
uauuuuagaauuauacuuua

SEQ ID NO: 15483 - RNA, 20 nt, Artificial Sequence
  SAMD9L targeting guide sequence portion
uauuuuuaaaaucacauaga

SEQ ID NO: 15484 - RNA, 20 nt, Artificial Sequence
  SAMD9L targeting guide sequence portion
ucaacccacuucuaccuauc

SEQ ID NO: 15485 - RNA, 20 nt, Artificial Sequence
  SAMD9L targeting guide sequence portion
ucaagcaguuuuaagaguca

SEQ ID NO: 15486 - RNA, 20 nt, Artificial Sequence
  SAMD9L targeting guide sequence portion
ucacaaaaccccaacuuuca

SEQ ID NO: 15487 - RNA, 20 nt, Artificial Sequence
  SAMD9L targeting guide sequence portion
ucacauagacaauuauguau

SEQ ID NO: 15488 - RNA, 20 nt, Artificial Sequence
  SAMD9L targeting guide sequence portion
ucaccaaguuaagcuaaaag

SEQ ID NO: 15489 - RNA, 20 nt, Artificial Sequence
  SAMD9L targeting guide sequence portion
ucaccaguuagcagcuauag

SEQ ID NO: 15490 - RNA, 20 nt, Artificial Sequence
  SAMD9L targeting guide sequence portion
ucaccuaagaaacaagggua

SEQ ID NO: 15491 - RNA, 20 nt, Artificial Sequence
  SAMD9L targeting guide sequence portion
ucagccuuuagcaauauuau

SEQ ID NO: 15492 - RNA, 20 nt, Artificial Sequence
  SAMD9L targeting guide sequence portion
ucauaauuacaauuagaguc

SEQ ID NO: 15493 - RNA, 20 nt, Artificial Sequence
  SAMD9L targeting guide sequence portion
ucauacagaagauacauaua

SEQ ID NO: 15494 - RNA, 20 nt, Artificial Sequence
  SAMD9L targeting guide sequence portion
ucauacccuuguuucuuagg

SEQ ID NO: 15495 - RNA, 20 nt, Artificial Sequence
  SAMD9L targeting guide sequence portion
ucauuauuuuaaaguuuauu

SEQ ID NO: 15496 - RNA, 20 nt, Artificial Sequence
  SAMD9L targeting guide sequence portion
uccaaaagaaaacagauuau

SEQ ID NO: 15497 - RNA, 20 nt, Artificial Sequence
  SAMD9L targeting guide sequence portion
uccacagcuggcuaucuuug

SEQ ID NO: 15498 - RNA, 20 nt, Artificial Sequence
  SAMD9L targeting guide sequence portion
uccaguuucauuauuuuaaa

SEQ ID NO: 15499 - RNA, 20 nt, Artificial Sequence
  SAMD9L targeting guide sequence portion
ucccuuuuagcuuaacuugg

SEQ ID NO: 15500 - RNA, 20 nt, Artificial Sequence
  SAMD9L targeting guide sequence portion
uccguagcauauaggaauau

SEQ ID NO: 15501 - RNA, 20 nt, Artificial Sequence
  SAMD9L targeting guide sequence portion
uccuaauucauacccuuguu

SEQ ID NO: 15502 - RNA, 20 nt, Artificial Sequence
  SAMD9L targeting guide sequence portion
uccuauaugcuacggaaacc

SEQ ID NO: 15503 - RNA, 20 nt, Artificial Sequence
  SAMD9L targeting guide sequence portion
uccucaacccacuucuaccu

SEQ ID NO: 15504 - RNA, 20 nt, Artificial Sequence
  SAMD9L targeting guide sequence portion
uccuguuccucaacccacuu

SEQ ID NO: 15505 - RNA, 20 nt, Artificial Sequence
  SAMD9L targeting guide sequence portion
ucuaaaauacuuauuauauu

SEQ ID NO: 15506 - RNA, 20 nt, Artificial Sequence
  SAMD9L targeting guide sequence portion
ucuaauuguaauuaugaaau

SEQ ID NO: 15507 - RNA, 20 nt, Artificial Sequence
  SAMD9L targeting guide sequence portion
ucuaccuauccaguuucauu

SEQ ID NO: 15508 - RNA, 20 nt, Artificial Sequence
  SAMD9L targeting guide sequence portion
ucuaugugauuuuaaaaaua

SEQ ID NO: 15509 - RNA, 20 nt, Artificial Sequence
  SAMD9L targeting guide sequence portion
ucuauguuacuuaagauucu

SEQ ID NO: 15510 - RNA, 20 nt, Artificial Sequence
  SAMD9L targeting guide sequence portion
ucucccuuuuagcuuaacuu

SEQ ID NO: 15511 - RNA, 20 nt, Artificial Sequence
  SAMD9L targeting guide sequence portion
ucugcuuuuaagucacaaaa

SEQ ID NO: 15512 - RNA, 20 nt, Artificial Sequence
  SAMD9L targeting guide sequence portion
ucuguaugauaauguauaca

SEQ ID NO: 15513 - RNA, 20 nt, Artificial Sequence
  SAMD9L targeting guide sequence portion
ucuguuacuauguaacaaag

SEQ ID NO: 15514 - RNA, 20 nt, Artificial Sequence
  SAMD9L targeting guide sequence portion
ucuguuuucuuuuggaacuc

SEQ ID NO: 15515 - RNA, 20 nt, Artificial Sequence
  SAMD9L targeting guide sequence portion
ucuuaaaacugcuugauacu

SEQ ID NO: 15516 - RNA, 20 nt, Artificial Sequence
  SAMD9L targeting guide sequence portion
ucuuaaguaacauagaaauu

SEQ ID NO: 15517 - RNA, 20 nt, Artificial Sequence
  SAMD9L targeting guide sequence portion
ucuuaggugacucuaauugu

SEQ ID NO: 15518 - RNA, 20 nt, Artificial Sequence
  SAMD9L targeting guide sequence portion
ucuucuguaugauaauguau

SEQ ID NO: 15519 - RNA, 20 nt, Artificial Sequence
  SAMD9L targeting guide sequence portion
ucuuuguuacauaguaacag

SEQ ID NO: 15520 - RNA, 20 nt, Artificial Sequence
  SAMD9L targeting guide sequence portion
ugaaacuggauagguagaag

SEQ ID NO: 15521 - RNA, 20 nt, Artificial Sequence
  SAMD9L targeting guide sequence portion
ugaaaguugggguuuuguga

SEQ ID NO: 15522 - RNA, 20 nt, Artificial Sequence
  SAMD9L targeting guide sequence portion
ugaaauaagcuauagcugcu

SEQ ID NO: 15523 - RNA, 20 nt, Artificial Sequence
  SAMD9L targeting guide sequence portion
ugaauuaggaugguaaaaua

SEQ ID NO: 15524 - RNA, 20 nt, Artificial Sequence
  SAMD9L targeting guide sequence portion
ugacacaccuuuuagccuua

SEQ ID NO: 15525 - RNA, 20 nt, Artificial Sequence
  SAMD9L targeting guide sequence portion
ugacucuaauuguaauuaug

SEQ ID NO: 15526 - RNA, 20 nt, Artificial Sequence
  SAMD9L targeting guide sequence portion
ugacucuuaaaacugcuuga

SEQ ID NO: 15527 - RNA, 20 nt, Artificial Sequence
  SAMD9L targeting guide sequence portion
ugacuuaaaagcagaaucuu

SEQ ID NO: 15528 - RNA, 20 nt, Artificial Sequence
  SAMD9L targeting guide sequence portion
ugagacaaagcaauauaaua

SEQ ID NO: 15529 - RNA, 20 nt, Artificial Sequence
  SAMD9L targeting guide sequence portion
ugaggaacaggaauccacag

SEQ ID NO: 15530 - RNA, 20 nt, Artificial Sequence
  SAMD9L targeting guide sequence portion
ugaguuccaaaagaaaacag

SEQ ID NO: 15531 - RNA, 20 nt, Artificial Sequence
  SAMD9L targeting guide sequence portion
ugauaauguauacauaauug

SEQ ID NO: 15532 - RNA, 20 nt, Artificial Sequence
  SAMD9L targeting guide sequence portion
ugauacuuacuuuagcuauu

SEQ ID NO: 15533 - RNA, 20 nt, Artificial Sequence
  SAMD9L targeting guide sequence portion
ugauuuuaaaaauaaaguau

SEQ ID NO: 15534 - RNA, 20 nt, Artificial Sequence
  SAMD9L targeting guide sequence portion
ugcaaauaaacuuuaaaaua

SEQ ID NO: 15535 - RNA, 20 nt, Artificial Sequence
  SAMD9L targeting guide sequence portion
ugcaauauuccuauaugcua

SEQ ID NO: 15536 - RNA, 20 nt, Artificial Sequence
  SAMD9L targeting guide sequence portion
ugcuaaaggcugacucuuaa

SEQ ID NO: 15537 - RNA, 20 nt, Artificial Sequence
  SAMD9L targeting guide sequence portion
ugcuaacuggugacacaccu

SEQ ID NO: 15538 - RNA, 20 nt, Artificial Sequence
  SAMD9L targeting guide sequence portion
ugcuacggaaaccaauuucu

SEQ ID NO: 15539 - RNA, 20 nt, Artificial Sequence
  SAMD9L targeting guide sequence portion
ugcucuguuacuauguaaca

SEQ ID NO: 15540 - RNA, 20 nt, Artificial Sequence
  SAMD9L targeting guide sequence portion
ugcuugauacuuacuuuagc

SEQ ID NO: 15541 - RNA, 20 nt, Artificial Sequence
  SAMD9L targeting guide sequence portion
ugcuuuuaagucacaaaacc

SEQ ID NO: 15542 - RNA, 20 nt, Artificial Sequence
  SAMD9L targeting guide sequence portion
uggauagguagaaguggguu

SEQ ID NO: 15543 - RNA, 20 nt, Artificial Sequence
  SAMD9L targeting guide sequence portion
uggauuccuguuccucaacc

SEQ ID NO: 15544 - RNA, 20 nt, Artificial Sequence
  SAMD9L targeting guide sequence portion
uggcuaucuuuguuacauag

SEQ ID NO: 15545 - RNA, 20 nt, Artificial Sequence
  SAMD9L targeting guide sequence portion
ugggguuuugugacuuaaaa

SEQ ID NO: 15546 - RNA, 20 nt, Artificial Sequence
  SAMD9L targeting guide sequence portion
uggguugaggaacaggaauc

SEQ ID NO: 15547 - RNA, 20 nt, Artificial Sequence
  SAMD9L targeting guide sequence portion
ugguaaaauagcuaaaguaa

SEQ ID NO: 15548 - RNA, 20 nt, Artificial Sequence
  SAMD9L targeting guide sequence portion
uggugaaaguugggguuuug

SEQ ID NO: 15549 - RNA, 20 nt, Artificial Sequence
  SAMD9L targeting guide sequence portion
uggugacacaccuuuuagcc

SEQ ID NO: 15550 - RNA, 20 nt, Artificial Sequence
  SAMD9L targeting guide sequence portion
ugguuaaauaaucuguuuuc

SEQ ID NO: 15551 - RNA, 20 nt, Artificial Sequence
  SAMD9L targeting guide sequence portion
ugguuuccguagcauauagg

SEQ ID NO: 15552 - RNA, 20 nt, Artificial Sequence
  SAMD9L targeting guide sequence portion
uguaacaaagauagccagcu

SEQ ID NO: 15553 - RNA, 20 nt, Artificial Sequence
  SAMD9L targeting guide sequence portion
uguaauuaugaaauaagcua

SEQ ID NO: 15554 - RNA, 20 nt, Artificial Sequence
  SAMD9L targeting guide sequence portion
uguauaauauugcuaaaggc

SEQ ID NO: 15555 - RNA, 20 nt, Artificial Sequence
  SAMD9L targeting guide sequence portion
uguauacauaauugucuaug

SEQ ID NO: 15556 - RNA, 20 nt, Artificial Sequence
  SAMD9L targeting guide sequence portion
uguauacauuaucauacaga

SEQ ID NO: 15557 - RNA, 20 nt, Artificial Sequence
  SAMD9L targeting guide sequence portion
uguaucuucuguaugauaau

SEQ ID NO: 15558 - RNA, 20 nt, Artificial Sequence
  SAMD9L targeting guide sequence portion
uguaugauaauguauacaua

SEQ ID NO: 15559 - RNA, 20 nt, Artificial Sequence
  SAMD9L targeting guide sequence portion
ugucaccaguuagcagcuau

SEQ ID NO: 15560 - RNA, 20 nt, Artificial Sequence
  SAMD9L targeting guide sequence portion
ugucuaugugauuuuaaaaa

SEQ ID NO: 15561 - RNA, 20 nt, Artificial Sequence
  SAMD9L targeting guide sequence portion
ugugacuuaaaagcagaauc

SEQ ID NO: 15562 - RNA, 20 nt, Artificial Sequence
  SAMD9L targeting guide sequence portion
ugugauuuuaaaaauaaagu

SEQ ID NO: 15563 - RNA, 20 nt, Artificial Sequence
  SAMD9L targeting guide sequence portion
uguggauuccuguuccucaa

SEQ ID NO: 15564 - RNA, 20 nt, Artificial Sequence
  SAMD9L targeting guide sequence portion
ugugucaccaguuagcagcu

SEQ ID NO: 15565 - RNA, 20 nt, Artificial Sequence
  SAMD9L targeting guide sequence portion
uguuacauaguaacagagca

SEQ ID NO: 15566 - RNA, 20 nt, Artificial Sequence
  SAMD9L targeting guide sequence portion
uguuacuauguaacaaagau

SEQ ID NO: 15567 - RNA, 20 nt, Artificial Sequence
  SAMD9L targeting guide sequence portion
uguuacuuaagauucugcuu

SEQ ID NO: 15568 - RNA, 20 nt, Artificial Sequence
  SAMD9L targeting guide sequence portion
uguuccucaacccacuucua

SEQ ID NO: 15569 - RNA, 20 nt, Artificial Sequence
  SAMD9L targeting guide sequence portion
uguuucuuaggugacucuaa

SEQ ID NO: 15570 - RNA, 20 nt, Artificial Sequence
  SAMD9L targeting guide sequence portion
uguuuucuuuuggaacucaa

SEQ ID NO: 15571 - RNA, 20 nt, Artificial Sequence
  SAMD9L targeting guide sequence portion
uuaaaaauaaaguauaauuc

SEQ ID NO: 15572 - RNA, 20 nt, Artificial Sequence
  SAMD9L targeting guide sequence portion
uuaaaacugcuugauacuua

SEQ ID NO: 15573 - RNA, 20 nt, Artificial Sequence
  SAMD9L targeting guide sequence portion
uuaaaagcagaaucuuaagu

SEQ ID NO: 15574 - RNA, 20 nt, Artificial Sequence
  SAMD9L targeting guide sequence portion
uuaaaauaaugaaacuggau

SEQ ID NO: 15575 - RNA, 20 nt, Artificial Sequence
  SAMD9L targeting guide sequence portion
uuaaaaucacauagacaauu

SEQ ID NO: 15576 - RNA, 20 nt, Artificial Sequence
  SAMD9L targeting guide sequence portion
uuaaaguuuauuugcaauau

SEQ ID NO: 15577 - RNA, 20 nt, Artificial Sequence
  SAMD9L targeting guide sequence portion
uuaaauaaucuguuuucuuu

SEQ ID NO: 15578 - RNA, 20 nt, Artificial Sequence
  SAMD9L targeting guide sequence portion
uuaaccaacugcucuguuac

SEQ ID NO: 15579 - RNA, 20 nt, Artificial Sequence
  SAMD9L targeting guide sequence portion
uuaacuuggugaaaguuggg

SEQ ID NO: 15580 - RNA, 20 nt, Artificial Sequence
  SAMD9L targeting guide sequence portion
uuaagagucagccuuuagca

SEQ ID NO: 15581 - RNA, 20 nt, Artificial Sequence
  SAMD9L targeting guide sequence portion
uuaagauucugcuuuuaagu

SEQ ID NO: 15582 - RNA, 20 nt, Artificial Sequence
  SAMD9L targeting guide sequence portion
uuaagcuaaaagggagaauu

SEQ ID NO: 15583 - RNA, 20 nt, Artificial Sequence
  SAMD9L targeting guide sequence portion
uuaaguaacauagaaauugg

SEQ ID NO: 15584 - RNA, 20 nt, Artificial Sequence
  SAMD9L targeting guide sequence portion
uuaagucacaaaaccccaac

SEQ ID NO: 15585 - RNA, 20 nt, Artificial Sequence
  SAMD9L targeting guide sequence portion
uuacaauuagagucaccuaa

SEQ ID NO: 15586 - RNA, 20 nt, Artificial Sequence
  SAMD9L targeting guide sequence portion
uuacauaguaacagagcagu

SEQ ID NO: 15587 - RNA, 20 nt, Artificial Sequence
  SAMD9L targeting guide sequence portion
uuaccauccuaauucauacc

SEQ ID NO: 15588 - RNA, 20 nt, Artificial Sequence
  SAMD9L targeting guide sequence portion
uuacuauguaacaaagauag

SEQ ID NO: 15589 - RNA, 20 nt, Artificial Sequence
  SAMD9L targeting guide sequence portion
uuacuuaagauucugcuuuu

SEQ ID NO: 15590 - RNA, 20 nt, Artificial Sequence
  SAMD9L targeting guide sequence portion
uuacuuuagcuauuuuacca

SEQ ID NO: 15591 - RNA, 20 nt, Artificial Sequence
  SAMD9L targeting guide sequence portion
uuagaauuauacuuuauuuu

SEQ ID NO: 15592 - RNA, 20 nt, Artificial Sequence
  SAMD9L targeting guide sequence portion
uuagagucaccuaagaaaca

SEQ ID NO: 15593 - RNA, 20 nt, Artificial Sequence
  SAMD9L targeting guide sequence portion
uuagcaauauuauacauaua

SEQ ID NO: 15594 - RNA, 20 nt, Artificial Sequence
  SAMD9L targeting guide sequence portion
uuagcagcuauagcuuauuu

SEQ ID NO: 15595 - RNA, 20 nt, Artificial Sequence
  SAMD9L targeting guide sequence portion
uuagcuauuuuaccauccua

SEQ ID NO: 15596 - RNA, 20 nt, Artificial Sequence
  SAMD9L targeting guide sequence portion
uuagcuuaacuuggugaaag

SEQ ID NO: 15597 - RNA, 20 nt, Artificial Sequence
  SAMD9L targeting guide sequence portion
uuaggaugguaaaauagcua

SEQ ID NO: 15598 - RNA, 20 nt, Artificial Sequence
  SAMD9L targeting guide sequence portion
uuaggugacucuaauuguaa

SEQ ID NO: 15599 - RNA, 20 nt, Artificial Sequence
  SAMD9L targeting guide sequence portion
uuauaaggcuaaaaggugug

SEQ ID NO: 15600 - RNA, 20 nt, Artificial Sequence
  SAMD9L targeting guide sequence portion
uuauaauaauucucccuuuu

SEQ ID NO: 15601 - RNA, 20 nt, Artificial Sequence
  SAMD9L targeting guide sequence portion
uuauacauauauauauguau

SEQ ID NO: 15602 - RNA, 20 nt, Artificial Sequence
  SAMD9L targeting guide sequence portion
uuauacuuuauuuuuaaaau

SEQ ID NO: 15603 - RNA, 20 nt, Artificial Sequence
  SAMD9L targeting guide sequence portion
uuaucauacagaagauacau

SEQ ID NO: 15604 - RNA, 20 nt, Artificial Sequence
  SAMD9L targeting guide sequence portion
uuaugaaauaagcuauagcu

SEQ ID NO: 15605 - RNA, 20 nt, Artificial Sequence
  SAMD9L targeting guide sequence portion
uuauguauacauuaucauac

SEQ ID NO: 15606 - RNA, 20 nt, Artificial Sequence
  SAMD9L targeting guide sequence portion
uuauuauaaggcuaaaaggu

SEQ ID NO: 15607 - RNA, 20 nt, Artificial Sequence
  SAMD9L targeting guide sequence portion
uuauuuaaccaacugcucug

SEQ ID NO: 15608 - RNA, 20 nt, Artificial Sequence
  SAMD9L targeting guide sequence portion
uuauuucauaauuacaauua

SEQ ID NO: 15609 - RNA, 20 nt, Artificial Sequence
  SAMD9L targeting guide sequence portion
uuauuugcaauauuccuaua

SEQ ID NO: 15610 - RNA, 20 nt, Artificial Sequence
  SAMD9L targeting guide sequence portion
uuauuuuaaaguuuauuugc

SEQ ID NO: 15611 - RNA, 20 nt, Artificial Sequence
  SAMD9L targeting guide sequence portion
uuauuuuuaaaaucacauag

SEQ ID NO: 15612 - RNA, 20 nt, Artificial Sequence
  SAMD9L targeting guide sequence portion
uucaccaaguuaagcuaaaa

SEQ ID NO: 15613 - RNA, 20 nt, Artificial Sequence
  SAMD9L targeting guide sequence portion
uucauaauuacaauuagagu

SEQ ID NO: 15614 - RNA, 20 nt, Artificial Sequence
  SAMD9L targeting guide sequence portion
uucauacccuuguuucuuag

SEQ ID NO: 15615 - RNA, 20 nt, Artificial Sequence
  SAMD9L targeting guide sequence portion
uucauuauuuuaaaguuuau

SEQ ID NO: 15616 - RNA, 20 nt, Artificial Sequence
  SAMD9L targeting guide sequence portion
uuccaaaagaaaacagauua

SEQ ID NO: 15617 - RNA, 20 nt, Artificial Sequence
  SAMD9L targeting guide sequence portion
uuccguagcauauaggaaua

SEQ ID NO: 15618 - RNA, 20 nt, Artificial Sequence
  SAMD9L targeting guide sequence portion
uuccuauaugcuacggaaac

SEQ ID NO: 15619 - RNA, 20 nt, Artificial Sequence
  SAMD9L targeting guide sequence portion
uuccucaacccacuucuacc

SEQ ID NO: 15620 - RNA, 20 nt, Artificial Sequence
  SAMD9L targeting guide sequence portion
uuccuguuccucaacccacu

SEQ ID NO: 15621 - RNA, 20 nt, Artificial Sequence
  SAMD9L targeting guide sequence portion
uucuaaaauacuuauuauau

SEQ ID NO: 15622 - RNA, 20 nt, Artificial Sequence
  SAMD9L targeting guide sequence portion
uucuaccuauccaguuucau

SEQ ID NO: 15623 - RNA, 20 nt, Artificial Sequence
  SAMD9L targeting guide sequence portion
uucuauguuacuuaagauuc

SEQ ID NO: 15624 - RNA, 20 nt, Artificial Sequence
  SAMD9L targeting guide sequence portion
uucucccuuuuagcuuaacu

SEQ ID NO: 15625 - RNA, 20 nt, Artificial Sequence
  SAMD9L targeting guide sequence portion
uucugcuuuuaagucacaaa

SEQ ID NO: 15626 - RNA, 20 nt, Artificial Sequence
  SAMD9L targeting guide sequence portion
uucuguaugauaauguauac

SEQ ID NO: 15627 - RNA, 20 nt, Artificial Sequence
  SAMD9L targeting guide sequence portion
uucuuaggugacucuaauug

SEQ ID NO: 15628 - RNA, 20 nt, Artificial Sequence
  SAMD9L targeting guide sequence portion
uugaggaacaggaauccaca

SEQ ID NO: 15629 - RNA, 20 nt, Artificial Sequence
  SAMD9L targeting guide sequence portion
uugaguuccaaaagaaaaca

SEQ ID NO: 15630 - RNA, 20 nt, Artificial Sequence
  SAMD9L targeting guide sequence portion
uugauacuuacuuuagcuau

SEQ ID NO: 15631 - RNA, 20 nt, Artificial Sequence
  SAMD9L targeting guide sequence portion
uugcaaauaaacuuuaaaau

SEQ ID NO: 15632 - RNA, 20 nt, Artificial Sequence
  SAMD9L targeting guide sequence portion
uugcaauauuccuauaugcu

SEQ ID NO: 15633 - RNA, 20 nt, Artificial Sequence
  SAMD9L targeting guide sequence portion
uugcuaaaggcugacucuua

SEQ ID NO: 15634 - RNA, 20 nt, Artificial Sequence
  SAMD9L targeting guide sequence portion
uugggguuuugugacuuaaa

SEQ ID NO: 15635 - RNA, 20 nt, Artificial Sequence
  SAMD9L targeting guide sequence portion
uuggugaaaguugggguuuu

SEQ ID NO: 15636 - RNA, 20 nt, Artificial Sequence
  SAMD9L targeting guide sequence portion
uugguuaaauaaucuguuuu

SEQ ID NO: 15637 - RNA, 20 nt, Artificial Sequence
  SAMD9L targeting guide sequence portion
uugguuuccguagcauauag

SEQ ID NO: 15638 - RNA, 20 nt, Artificial Sequence
  SAMD9L targeting guide sequence portion
uuguaauuaugaaauaagcu

SEQ ID NO: 15639 - RNA, 20 nt, Artificial Sequence
  SAMD9L targeting guide sequence portion
uugucuaugugauuuuaaaa

SEQ ID NO: 15640 - RNA, 20 nt, Artificial Sequence
  SAMD9L targeting guide sequence portion
uugugacuuaaaagcagaau

SEQ ID NO: 15641 - RNA, 20 nt, Artificial Sequence
  SAMD9L targeting guide sequence portion
uuguuacauaguaacagagc

SEQ ID NO: 15642 - RNA, 20 nt, Artificial Sequence
  SAMD9L targeting guide sequence portion
uuguuucuuaggugacucua

SEQ ID NO: 15643 - RNA, 20 nt, Artificial Sequence
  SAMD9L targeting guide sequence portion
uuuaaaaauaaaguauaauu

SEQ ID NO: 15644 - RNA, 20 nt, Artificial Sequence
  SAMD9L targeting guide sequence portion
uuuaaaauaaugaaacugga

SEQ ID NO: 15645 - RNA, 20 nt, Artificial Sequence
  SAMD9L targeting guide sequence portion
uuuaaaaucacauagacaau

SEQ ID NO: 15646 - RNA, 20 nt, Artificial Sequence
  SAMD9L targeting guide sequence portion
uuuaaaguuuauuugcaaua

SEQ ID NO: 15647 - RNA, 20 nt, Artificial Sequence
  SAMD9L targeting guide sequence portion
uuuaaccaacugcucuguua

SEQ ID NO: 15648 - RNA, 20 nt, Artificial Sequence
  SAMD9L targeting guide sequence portion
uuuaagagucagccuuuagc

SEQ ID NO: 15649 - RNA, 20 nt, Artificial Sequence
  SAMD9L targeting guide sequence portion
uuuaagucacaaaaccccaa

SEQ ID NO: 15650 - RNA, 20 nt, Artificial Sequence
  SAMD9L targeting guide sequence portion
uuuaccauccuaauucauac

SEQ ID NO: 15651 - RNA, 20 nt, Artificial Sequence
  SAMD9L targeting guide sequence portion
uuuagaauuauacuuuauuu

SEQ ID NO: 15652 - RNA, 20 nt, Artificial Sequence
  SAMD9L targeting guide sequence portion
uuuagcaauauuauacauau

SEQ ID NO: 15653 - RNA, 20 nt, Artificial Sequence
  SAMD9L targeting guide sequence portion
uuuagcuauuuuaccauccu

SEQ ID NO: 15654 - RNA, 20 nt, Artificial Sequence
  SAMD9L targeting guide sequence portion
uuuagcuuaacuuggugaaa

SEQ ID NO: 15655 - RNA, 20 nt, Artificial Sequence
  SAMD9L targeting guide sequence portion
uuuauuugcaauauuccuau

SEQ ID NO: 15656 - RNA, 20 nt, Artificial Sequence
  SAMD9L targeting guide sequence portion
uuuauuuuuaaaaucacaua

SEQ ID NO: 15657 - RNA, 20 nt, Artificial Sequence
  SAMD9L targeting guide sequence portion
uuucaccaaguuaagcuaaa

SEQ ID NO: 15658 - RNA, 20 nt, Artificial Sequence
  SAMD9L targeting guide sequence portion
uuucauaauuacaauuagag

SEQ ID NO: 15659 - RNA, 20 nt, Artificial Sequence
  SAMD9L targeting guide sequence portion
uuucauuauuuuaaaguuua

SEQ ID NO: 15660 - RNA, 20 nt, Artificial Sequence
  SAMD9L targeting guide sequence portion
uuuccguagcauauaggaau

SEQ ID NO: 15661 - RNA, 20 nt, Artificial Sequence
  SAMD9L targeting guide sequence portion
uuucuauguuacuuaagauu

SEQ ID NO: 15662 - RNA, 20 nt, Artificial Sequence
  SAMD9L targeting guide sequence portion
uuucuuaggugacucuaauu

SEQ ID NO: 15663 - RNA, 20 nt, Artificial Sequence
  SAMD9L targeting guide sequence portion
uuugcaauauuccuauaugc

SEQ ID NO: 15664 - RNA, 20 nt, Artificial Sequence
  SAMD9L targeting guide sequence portion
uuugugacuuaaaagcagaa

SEQ ID NO: 15665 - RNA, 20 nt, Artificial Sequence
  SAMD9L targeting guide sequence portion
uuuguuacauaguaacagag

SEQ ID NO: 15666 - RNA, 20 nt, Artificial Sequence
  SAMD9L targeting guide sequence portion
uuuuaaaaauaaaguauaau

SEQ ID NO: 15667 - RNA, 20 nt, Artificial Sequence
  SAMD9L targeting guide sequence portion
uuuuaaaaucacauagacaa

SEQ ID NO: 15668 - RNA, 20 nt, Artificial Sequence
  SAMD9L targeting guide sequence portion
uuuuaaaguuuauuugcaau

SEQ ID NO: 15669 - RNA, 20 nt, Artificial Sequence
  SAMD9L targeting guide sequence portion
uuuuaagagucagccuuuag

SEQ ID NO: 15670 - RNA, 20 nt, Artificial Sequence
  SAMD9L targeting guide sequence portion
uuuuaagucacaaaacccca

SEQ ID NO: 15671 - RNA, 20 nt, Artificial Sequence
  SAMD9L targeting guide sequence portion
uuuuaccauccuaauucaua

SEQ ID NO: 15672 - RNA, 20 nt, Artificial Sequence
  SAMD9L targeting guide sequence portion
uuuuagaauuauacuuuauu

SEQ ID NO: 15673 - RNA, 20 nt, Artificial Sequence
  SAMD9L targeting guide sequence portion
uuuuagccuuauaauaauuc

SEQ ID NO: 15674 - RNA, 20 nt, Artificial Sequence
  SAMD9L targeting guide sequence portion
uuuuagcuuaacuuggugaa

SEQ ID NO: 15675 - RNA, 20 nt, Artificial Sequence
  SAMD9L targeting guide sequence portion
uuuugugacuuaaaagcaga

SEQ ID NO: 15676 - RNA, 20 nt, Artificial Sequence
  SAMD9L targeting guide sequence portion
uuuuuaaaaucacauagaca

SEQ ID NO: 15677 - RNA, 21 nt, Artificial Sequence
  SAMD9L targeting guide sequence portion
aaaaauaaaguauaauucuaa

SEQ ID NO: 15678 - RNA, 21 nt, Artificial Sequence
  SAMD9L targeting guide sequence portion
aaaacagauuauuuaaccaac

SEQ ID NO: 15679 - RNA, 21 nt, Artificial Sequence
  SAMD9L targeting guide sequence portion
aaaaccccaacuuucaccaag

SEQ ID NO: 15680 - RNA, 21 nt, Artificial Sequence
  SAMD9L targeting guide sequence portion
aaaacugcuugauacuuacuu

SEQ ID NO: 15681 - RNA, 21 nt, Artificial Sequence
  SAMD9L targeting guide sequence portion
aaaagaaaacagauuauuuaa

SEQ ID NO: 15682 - RNA, 21 nt, Artificial Sequence
  SAMD9L targeting guide sequence portion
aaaagcagaaucuuaaguaac

SEQ ID NO: 15683 - RNA, 21 nt, Artificial Sequence
  SAMD9L targeting guide sequence portion
aaaaggugugucaccaguuag

SEQ ID NO: 15684 - RNA, 21 nt, Artificial Sequence
  SAMD9L targeting guide sequence portion
aaaauaaaguauaauucuaaa

SEQ ID NO: 15685 - RNA, 21 nt, Artificial Sequence
  SAMD9L targeting guide sequence portion
aaaauaaugaaacuggauagg

SEQ ID NO: 15686 - RNA, 21 nt, Artificial Sequence
  SAMD9L targeting guide sequence portion
aaaauacuuauuauauugcuu

SEQ ID NO: 15687 - RNA, 21 nt, Artificial Sequence
  SAMD9L targeting guide sequence portion
aaaauagcuaaaguaaguauc

SEQ ID NO: 15688 - RNA, 21 nt, Artificial Sequence
  SAMD9L targeting guide sequence portion
aaaaucacauagacaauuaug

SEQ ID NO: 15689 - RNA, 21 nt, Artificial Sequence
  SAMD9L targeting guide sequence portion
aaacaaggguaugaauuagga

SEQ ID NO: 15690 - RNA, 21 nt, Artificial Sequence
  SAMD9L targeting guide sequence portion
aaacagauuauuuaaccaacu

SEQ ID NO: 15691 - RNA, 21 nt, Artificial Sequence
  SAMD9L targeting guide sequence portion
aaaccaauuucuauguuacuu

SEQ ID NO: 15692 - RNA, 21 nt, Artificial Sequence
  SAMD9L targeting guide sequence portion
aaaccccaacuuucaccaagu

SEQ ID NO: 15693 - RNA, 21 nt, Artificial Sequence
  SAMD9L targeting guide sequence portion
aaacugcuugauacuuacuuu

SEQ ID NO: 15694 - RNA, 21 nt, Artificial Sequence
  SAMD9L targeting guide sequence portion
aaacuggauagguagaagugg

SEQ ID NO: 15695 - RNA, 21 nt, Artificial Sequence
  SAMD9L targeting guide sequence portion
aaacuuuaaaauaaugaaacu

SEQ ID NO: 15696 - RNA, 21 nt, Artificial Sequence
  SAMD9L targeting guide sequence portion
aaagaaaacagauuauuuaac

SEQ ID NO: 15697 - RNA, 21 nt, Artificial Sequence
  SAMD9L targeting guide sequence portion
aaagauagccagcuguggauu

SEQ ID NO: 15698 - RNA, 21 nt, Artificial Sequence
  SAMD9L targeting guide sequence portion
aaagcaauauaauaaguauuu

SEQ ID NO: 15699 - RNA, 21 nt, Artificial Sequence
  SAMD9L targeting guide sequence portion
aaagcagaaucuuaaguaaca

SEQ ID NO: 15700 - RNA, 21 nt, Artificial Sequence
  SAMD9L targeting guide sequence portion
aaaggcugacucuuaaaacug

SEQ ID NO: 15701 - RNA, 21 nt, Artificial Sequence
  SAMD9L targeting guide sequence portion
aaagggagaauuauuauaagg

SEQ ID NO: 15702 - RNA, 21 nt, Artificial Sequence
  SAMD9L targeting guide sequence portion
aaaggugugucaccaguuagc

SEQ ID NO: 15703 - RNA, 21 nt, Artificial Sequence
  SAMD9L targeting guide sequence portion
aaaguaaguaucaagcaguuu

SEQ ID NO: 15704 - RNA, 21 nt, Artificial Sequence
  SAMD9L targeting guide sequence portion
aaaguauaauucuaaaauacu

SEQ ID NO: 15705 - RNA, 21 nt, Artificial Sequence
  SAMD9L targeting guide sequence portion
aaaguugggguuuugugacuu

SEQ ID NO: 15706 - RNA, 21 nt, Artificial Sequence
  SAMD9L targeting guide sequence portion
aaaguuuauuugcaauauucc

SEQ ID NO: 15707 - RNA, 21 nt, Artificial Sequence
  SAMD9L targeting guide sequence portion
aaauaaacuuuaaaauaauga

SEQ ID NO: 15708 - RNA, 21 nt, Artificial Sequence
  SAMD9L targeting guide sequence portion
aaauaaaguauaauucuaaaa

SEQ ID NO: 15709 - RNA, 21 nt, Artificial Sequence
  SAMD9L targeting guide sequence portion
aaauaagcuauagcugcuaac

SEQ ID NO: 15710 - RNA, 21 nt, Artificial Sequence
  SAMD9L targeting guide sequence portion
aaauaaucuguuuucuuuugg

SEQ ID NO: 15711 - RNA, 21 nt, Artificial Sequence
  SAMD9L targeting guide sequence portion
aaauaaugaaacuggauaggu

SEQ ID NO: 15712 - RNA, 21 nt, Artificial Sequence
  SAMD9L targeting guide sequence portion
aaauacuuauuauauugcuuu

SEQ ID NO: 15713 - RNA, 21 nt, Artificial Sequence
  SAMD9L targeting guide sequence portion
aaauagcuaaaguaaguauca

SEQ ID NO: 15714 - RNA, 21 nt, Artificial Sequence
  SAMD9L targeting guide sequence portion
aaaucacauagacaauuaugu

SEQ ID NO: 15715 - RNA, 21 nt, Artificial Sequence
  SAMD9L targeting guide sequence portion
aaauugguuuccguagcauau

SEQ ID NO: 15716 - RNA, 21 nt, Artificial Sequence
  SAMD9L targeting guide sequence portion
aacaaagauagccagcugugg

SEQ ID NO: 15717 - RNA, 21 nt, Artificial Sequence
  SAMD9L targeting guide sequence portion
aacaaggguaugaauuaggau

SEQ ID NO: 15718 - RNA, 21 nt, Artificial Sequence
  SAMD9L targeting guide sequence portion
aacagagcaguugguuaaaua

SEQ ID NO: 15719 - RNA, 21 nt, Artificial Sequence
  SAMD9L targeting guide sequence portion
aacagauuauuuaaccaacug

SEQ ID NO: 15720 - RNA, 21 nt, Artificial Sequence
  SAMD9L targeting guide sequence portion
aacagcuugaguuccaaaaga

SEQ ID NO: 15721 - RNA, 21 nt, Artificial Sequence
  SAMD9L targeting guide sequence portion
aacaggaauccacagcuggcu

SEQ ID NO: 15722 - RNA, 21 nt, Artificial Sequence
  SAMD9L targeting guide sequence portion
aacauagaaauugguuuccgu

SEQ ID NO: 15723 - RNA, 21 nt, Artificial Sequence
  SAMD9L targeting guide sequence portion
aaccaacugcucuguuacuau

SEQ ID NO: 15724 - RNA, 21 nt, Artificial Sequence
  SAMD9L targeting guide sequence portion
aaccaauuucuauguuacuua

SEQ ID NO: 15725 - RNA, 21 nt, Artificial Sequence
  SAMD9L targeting guide sequence portion
aacccacuucuaccuauccag

SEQ ID NO: 15726 - RNA, 21 nt, Artificial Sequence
  SAMD9L targeting guide sequence portion
aaccccaacuuucaccaaguu

SEQ ID NO: 15727 - RNA, 21 nt, Artificial Sequence
  SAMD9L targeting guide sequence portion
aacugcucuguuacuauguaa

SEQ ID NO: 15728 - RNA, 21 nt, Artificial Sequence
  SAMD9L targeting guide sequence portion
aacugcuugauacuuacuuua

SEQ ID NO: 15729 - RNA, 21 nt, Artificial Sequence
  SAMD9L targeting guide sequence portion
aacuggauagguagaaguggg

SEQ ID NO: 15730 - RNA, 21 nt, Artificial Sequence
  SAMD9L targeting guide sequence portion
aacuggugacacaccuuuuag

SEQ ID NO: 15731 - RNA, 21 nt, Artificial Sequence
  SAMD9L targeting guide sequence portion
aacuuggugaaaguugggguu

SEQ ID NO: 15732 - RNA, 21 nt, Artificial Sequence
  SAMD9L targeting guide sequence portion
aacuuuaaaauaaugaaacug

SEQ ID NO: 15733 - RNA, 21 nt, Artificial Sequence
  SAMD9L targeting guide sequence portion
aacuuucaccaaguuaagcua

SEQ ID NO: 15734 - RNA, 21 nt, Artificial Sequence
  SAMD9L targeting guide sequence portion
aagaaaacagauuauuuaacc

SEQ ID NO: 15735 - RNA, 21 nt, Artificial Sequence
  SAMD9L targeting guide sequence portion
aagaaacaaggguaugaauua

SEQ ID NO: 15736 - RNA, 21 nt, Artificial Sequence
  SAMD9L targeting guide sequence portion
aagagucagccuuuagcaaua

SEQ ID NO: 15737 - RNA, 21 nt, Artificial Sequence
  SAMD9L targeting guide sequence portion
aagauacauauauauauguau

SEQ ID NO: 15738 - RNA, 21 nt, Artificial Sequence
  SAMD9L targeting guide sequence portion
aagauagccagcuguggauuc

SEQ ID NO: 15739 - RNA, 21 nt, Artificial Sequence
  SAMD9L targeting guide sequence portion
aagauucugcuuuuaagucac

SEQ ID NO: 15740 - RNA, 21 nt, Artificial Sequence
  SAMD9L targeting guide sequence portion
aagcaauauaauaaguauuuu

SEQ ID NO: 15741 - RNA, 21 nt, Artificial Sequence
  SAMD9L targeting guide sequence portion
aagcagaaucuuaaguaacau

SEQ ID NO: 15742 - RNA, 21 nt, Artificial Sequence
  SAMD9L targeting guide sequence portion
aagcaguuuuaagagucagcc

SEQ ID NO: 15743 - RNA, 21 nt, Artificial Sequence
  SAMD9L targeting guide sequence portion
aagcuaaaagggagaauuauu

SEQ ID NO: 15744 - RNA, 21 nt, Artificial Sequence
  SAMD9L targeting guide sequence portion
aagcuauagcugcuaacuggu

SEQ ID NO: 15745 - RNA, 21 nt, Artificial Sequence
  SAMD9L targeting guide sequence portion
aaggcuaaaaggugugucacc

SEQ ID NO: 15746 - RNA, 21 nt, Artificial Sequence
  SAMD9L targeting guide sequence portion
aaggcugacucuuaaaacugc

SEQ ID NO: 15747 - RNA, 21 nt, Artificial Sequence
  SAMD9L targeting guide sequence portion
aagggagaauuauuauaaggc

SEQ ID NO: 15748 - RNA, 21 nt, Artificial Sequence
  SAMD9L targeting guide sequence portion
aaggguaugaauuaggauggu

SEQ ID NO: 15749 - RNA, 21 nt, Artificial Sequence
  SAMD9L targeting guide sequence portion
aaggugugucaccaguuagca

SEQ ID NO: 15750 - RNA, 21 nt, Artificial Sequence
  SAMD9L targeting guide sequence portion
aaguaacauagaaauugguuu

SEQ ID NO: 15751 - RNA, 21 nt, Artificial Sequence
  SAMD9L targeting guide sequence portion
aaguaaguaucaagcaguuuu

SEQ ID NO: 15752 - RNA, 21 nt, Artificial Sequence
  SAMD9L targeting guide sequence portion
aaguauaauucuaaaauacuu

SEQ ID NO: 15753 - RNA, 21 nt, Artificial Sequence
  SAMD9L targeting guide sequence portion
aaguaucaagcaguuuuaaga

SEQ ID NO: 15754 - RNA, 21 nt, Artificial Sequence
  SAMD9L targeting guide sequence portion
aaguauuuuagaauuauacuu

SEQ ID NO: 15755 - RNA, 21 nt, Artificial Sequence
  SAMD9L targeting guide sequence portion
aagucacaaaaccccaacuuu

SEQ ID NO: 15756 - RNA, 21 nt, Artificial Sequence
  SAMD9L targeting guide sequence portion
aaguggguugaggaacaggaa

SEQ ID NO: 15757 - RNA, 21 nt, Artificial Sequence
  SAMD9L targeting guide sequence portion
aaguuaagcuaaaagggagaa

SEQ ID NO: 15758 - RNA, 21 nt, Artificial Sequence
  SAMD9L targeting guide sequence portion
aaguugggguuuugugacuua

SEQ ID NO: 15759 - RNA, 21 nt, Artificial Sequence
  SAMD9L targeting guide sequence portion
aaguuuauuugcaauauuccu

SEQ ID NO: 15760 - RNA, 21 nt, Artificial Sequence
  SAMD9L targeting guide sequence portion
aauaaacuuuaaaauaaugaa

SEQ ID NO: 15761 - RNA, 21 nt, Artificial Sequence
  SAMD9L targeting guide sequence portion
aauaaaguauaauucuaaaau

SEQ ID NO: 15762 - RNA, 21 nt, Artificial Sequence
  SAMD9L targeting guide sequence portion
aauaagcuauagcugcuaacu

SEQ ID NO: 15763 - RNA, 21 nt, Artificial Sequence
  SAMD9L targeting guide sequence portion
aauaaguauuuuagaauuaua

SEQ ID NO: 15764 - RNA, 21 nt, Artificial Sequence
  SAMD9L targeting guide sequence portion
aauaaucuguuuucuuuugga

SEQ ID NO: 15765 - RNA, 21 nt, Artificial Sequence
  SAMD9L targeting guide sequence portion
aauaaugaaacuggauaggua

SEQ ID NO: 15766 - RNA, 21 nt, Artificial Sequence
  SAMD9L targeting guide sequence portion
aauaauucucccuuuuagcuu

SEQ ID NO: 15767 - RNA, 21 nt, Artificial Sequence
  SAMD9L targeting guide sequence portion
aauacuuauuauauugcuuug

SEQ ID NO: 15768 - RNA, 21 nt, Artificial Sequence
  SAMD9L targeting guide sequence portion
aauagcuaaaguaaguaucaa

SEQ ID NO: 15769 - RNA, 21 nt, Artificial Sequence
  SAMD9L targeting guide sequence portion
aauauaauaaguauuuuagaa

SEQ ID NO: 15770 - RNA, 21 nt, Artificial Sequence
  SAMD9L targeting guide sequence portion
aauauuauacauauauauaug

SEQ ID NO: 15771 - RNA, 21 nt, Artificial Sequence
  SAMD9L targeting guide sequence portion
aauauuccuauaugcuacgga

SEQ ID NO: 15772 - RNA, 21 nt, Artificial Sequence
  SAMD9L targeting guide sequence portion
aauauugcaaauaaacuuuaa

SEQ ID NO: 15773 - RNA, 21 nt, Artificial Sequence
  SAMD9L targeting guide sequence portion
aauauugcuaaaggcugacuc

SEQ ID NO: 15774 - RNA, 21 nt, Artificial Sequence
  SAMD9L targeting guide sequence portion
aaucacauagacaauuaugua

SEQ ID NO: 15775 - RNA, 21 nt, Artificial Sequence
  SAMD9L targeting guide sequence portion
aauccacagcuggcuaucuuu

SEQ ID NO: 15776 - RNA, 21 nt, Artificial Sequence
  SAMD9L targeting guide sequence portion
aaucuguuuucuuuuggaacu

SEQ ID NO: 15777 - RNA, 21 nt, Artificial Sequence
  SAMD9L targeting guide sequence portion
aaucuuaaguaacauagaaau

SEQ ID NO: 15778 - RNA, 21 nt, Artificial Sequence
  SAMD9L targeting guide sequence portion
aaugaaacuggauagguagaa

SEQ ID NO: 15779 - RNA, 21 nt, Artificial Sequence
  SAMD9L targeting guide sequence portion
aauguauacauaauugucuau

SEQ ID NO: 15780 - RNA, 21 nt, Artificial Sequence
  SAMD9L targeting guide sequence portion
aauuacaauuagagucaccua

SEQ ID NO: 15781 - RNA, 21 nt, Artificial Sequence
  SAMD9L targeting guide sequence portion
aauuagagucaccuaagaaac

SEQ ID NO: 15782 - RNA, 21 nt, Artificial Sequence
  SAMD9L targeting guide sequence portion
aauuaggaugguaaaauagcu

SEQ ID NO: 15783 - RNA, 21 nt, Artificial Sequence
  SAMD9L targeting guide sequence portion
aauuauacuuuauuuuuaaaa

SEQ ID NO: 15784 - RNA, 21 nt, Artificial Sequence
  SAMD9L targeting guide sequence portion
aauuaugaaauaagcuauagc

SEQ ID NO: 15785 - RNA, 21 nt, Artificial Sequence
  SAMD9L targeting guide sequence portion
aauuauguauacauuaucaua

SEQ ID NO: 15786 - RNA, 21 nt, Artificial Sequence
  SAMD9L targeting guide sequence portion
aauuauuauaaggcuaaaagg

SEQ ID NO: 15787 - RNA, 21 nt, Artificial Sequence
  SAMD9L targeting guide sequence portion
aauucauacccuuguuucuua

SEQ ID NO: 15788 - RNA, 21 nt, Artificial Sequence
  SAMD9L targeting guide sequence portion
aauucuaaaauacuuauuaua

SEQ ID NO: 15789 - RNA, 21 nt, Artificial Sequence
  SAMD9L targeting guide sequence portion
aauucucccuuuuagcuuaac

SEQ ID NO: 15790 - RNA, 21 nt, Artificial Sequence
  SAMD9L targeting guide sequence portion
aauugguuuccguagcauaua

SEQ ID NO: 15791 - RNA, 21 nt, Artificial Sequence
  SAMD9L targeting guide sequence portion
aauuguaauuaugaaauaagc

SEQ ID NO: 15792 - RNA, 21 nt, Artificial Sequence
  SAMD9L targeting guide sequence portion
aauugucuaugugauuuuaaa

SEQ ID NO: 15793 - RNA, 21 nt, Artificial Sequence
  SAMD9L targeting guide sequence portion
aauuucuauguuacuuaagau

SEQ ID NO: 15794 - RNA, 21 nt, Artificial Sequence
  SAMD9L targeting guide sequence portion
acaaaaccccaacuuucacca

SEQ ID NO: 15795 - RNA, 21 nt, Artificial Sequence
  SAMD9L targeting guide sequence portion
acaaagauagccagcugugga

SEQ ID NO: 15796 - RNA, 21 nt, Artificial Sequence
  SAMD9L targeting guide sequence portion
acaaagcaauauaauaaguau

SEQ ID NO: 15797 - RNA, 21 nt, Artificial Sequence
  SAMD9L targeting guide sequence portion
acaaggguaugaauuaggaug

SEQ ID NO: 15798 - RNA, 21 nt, Artificial Sequence
  SAMD9L targeting guide sequence portion
acaauuagagucaccuaagaa

SEQ ID NO: 15799 - RNA, 21 nt, Artificial Sequence
  SAMD9L targeting guide sequence portion
acaauuauguauacauuauca

SEQ ID NO: 15800 - RNA, 21 nt, Artificial Sequence
  SAMD9L targeting guide sequence portion
acacaccuuuuagccuuauaa

SEQ ID NO: 15801 - RNA, 21 nt, Artificial Sequence
  SAMD9L targeting guide sequence portion
acaccuuuuagccuuauaaua

SEQ ID NO: 15802 - RNA, 21 nt, Artificial Sequence
  SAMD9L targeting guide sequence portion
acagaagauacauauauauau

SEQ ID NO: 15803 - RNA, 21 nt, Artificial Sequence
  SAMD9L targeting guide sequence portion
acagagcaguugguuaaauaa

SEQ ID NO: 15804 - RNA, 21 nt, Artificial Sequence
  SAMD9L targeting guide sequence portion
acagauuauuuaaccaacugc

SEQ ID NO: 15805 - RNA, 21 nt, Artificial Sequence
  SAMD9L targeting guide sequence portion
acagcuggcuaucuuuguuac

SEQ ID NO: 15806 - RNA, 21 nt, Artificial Sequence
  SAMD9L targeting guide sequence portion
acagcuugaguuccaaaagaa

SEQ ID NO: 15807 - RNA, 21 nt, Artificial Sequence
  SAMD9L targeting guide sequence portion
acaggaauccacagcuggcua

SEQ ID NO: 15808 - RNA, 21 nt, Artificial Sequence
  SAMD9L targeting guide sequence portion
acauaauugucuaugugauuu

SEQ ID NO: 15809 - RNA, 21 nt, Artificial Sequence
  SAMD9L targeting guide sequence portion
acauagaaauugguuuccgua

SEQ ID NO: 15810 - RNA, 21 nt, Artificial Sequence
  SAMD9L targeting guide sequence portion
acauagacaauuauguauaca

SEQ ID NO: 15811 - RNA, 21 nt, Artificial Sequence
  SAMD9L targeting guide sequence portion
acauaguaacagagcaguugg

SEQ ID NO: 15812 - RNA, 21 nt, Artificial Sequence
  SAMD9L targeting guide sequence portion
acauauauauauguauaauau

SEQ ID NO: 15813 - RNA, 21 nt, Artificial Sequence
  SAMD9L targeting guide sequence portion
acauauauauauguaucuucu

SEQ ID NO: 15814 - RNA, 21 nt, Artificial Sequence
  SAMD9L targeting guide sequence portion
acauuaucauacagaagauac

SEQ ID NO: 15815 - RNA, 21 nt, Artificial Sequence
  SAMD9L targeting guide sequence portion
accaacugcucuguuacuaug

SEQ ID NO: 15816 - RNA, 21 nt, Artificial Sequence
  SAMD9L targeting guide sequence portion
accaaguuaagcuaaaaggga

SEQ ID NO: 15817 - RNA, 21 nt, Artificial Sequence
  SAMD9L targeting guide sequence portion
accaauuucuauguuacuuaa

SEQ ID NO: 15818 - RNA, 21 nt, Artificial Sequence
  SAMD9L targeting guide sequence portion
accaguuagcagcuauagcuu

SEQ ID NO: 15819 - RNA, 21 nt, Artificial Sequence
  SAMD9L targeting guide sequence portion
accauccuaauucauacccuu

SEQ ID NO: 15820 - RNA, 21 nt, Artificial Sequence
  SAMD9L targeting guide sequence portion
acccacuucuaccuauccagu

SEQ ID NO: 15821 - RNA, 21 nt, Artificial Sequence
  SAMD9L targeting guide sequence portion
accccaacuuucaccaaguua

SEQ ID NO: 15822 - RNA, 21 nt, Artificial Sequence
  SAMD9L targeting guide sequence portion
acccuuguuucuuaggugacu

SEQ ID NO: 15823 - RNA, 21 nt, Artificial Sequence
  SAMD9L targeting guide sequence portion
accuaagaaacaaggguauga

SEQ ID NO: 15824 - RNA, 21 nt, Artificial Sequence
  SAMD9L targeting guide sequence portion
accuauccaguuucauuauuu

SEQ ID NO: 15825 - RNA, 21 nt, Artificial Sequence
  SAMD9L targeting guide sequence portion
accuuuuagccuuauaauaau

SEQ ID NO: 15826 - RNA, 21 nt, Artificial Sequence
  SAMD9L targeting guide sequence portion
acggaaaccaauuucuauguu

SEQ ID NO: 15827 - RNA, 21 nt, Artificial Sequence
  SAMD9L targeting guide sequence portion
acuauguaacaaagauagcca

SEQ ID NO: 15828 - RNA, 21 nt, Artificial Sequence
  SAMD9L targeting guide sequence portion
acucuaauuguaauuaugaaa

SEQ ID NO: 15829 - RNA, 21 nt, Artificial Sequence
  SAMD9L targeting guide sequence portion
acucuuaaaacugcuugauac

SEQ ID NO: 15830 - RNA, 21 nt, Artificial Sequence
  SAMD9L targeting guide sequence portion
acugcucuguuacuauguaac

SEQ ID NO: 15831 - RNA, 21 nt, Artificial Sequence
  SAMD9L targeting guide sequence portion
acugcuugauacuuacuuuag

SEQ ID NO: 15832 - RNA, 21 nt, Artificial Sequence
  SAMD9L targeting guide sequence portion
acuggauagguagaagugggu

SEQ ID NO: 15833 - RNA, 21 nt, Artificial Sequence
  SAMD9L targeting guide sequence portion
acuggugacacaccuuuuagc

SEQ ID NO: 15834 - RNA, 21 nt, Artificial Sequence
  SAMD9L targeting guide sequence portion
acuuaaaagcagaaucuuaag

SEQ ID NO: 15835 - RNA, 21 nt, Artificial Sequence
  SAMD9L targeting guide sequence portion
acuuaagauucugcuuuuaag

SEQ ID NO: 15836 - RNA, 21 nt, Artificial Sequence
  SAMD9L targeting guide sequence portion
acuuacuuuagcuauuuuacc

SEQ ID NO: 15837 - RNA, 21 nt, Artificial Sequence
  SAMD9L targeting guide sequence portion
acuucuaccuauccaguuuca

SEQ ID NO: 15838 - RNA, 21 nt, Artificial Sequence
  SAMD9L targeting guide sequence portion
acuuggugaaaguugggguuu

SEQ ID NO: 15839 - RNA, 21 nt, Artificial Sequence
  SAMD9L targeting guide sequence portion
acuuuaaaauaaugaaacugg

SEQ ID NO: 15840 - RNA, 21 nt, Artificial Sequence
  SAMD9L targeting guide sequence portion
acuuuagcuauuuuaccaucc

SEQ ID NO: 15841 - RNA, 21 nt, Artificial Sequence
  SAMD9L targeting guide sequence portion
acuuuauuuuuaaaaucacau

SEQ ID NO: 15842 - RNA, 21 nt, Artificial Sequence
  SAMD9L targeting guide sequence portion
acuuucaccaaguuaagcuaa

SEQ ID NO: 15843 - RNA, 21 nt, Artificial Sequence
  SAMD9L targeting guide sequence portion
agaaaacagauuauuuaacca

SEQ ID NO: 15844 - RNA, 21 nt, Artificial Sequence
  SAMD9L targeting guide sequence portion
agaaacaaggguaugaauuag

SEQ ID NO: 15845 - RNA, 21 nt, Artificial Sequence
  SAMD9L targeting guide sequence portion
agaaauugguuuccguagcau

SEQ ID NO: 15846 - RNA, 21 nt, Artificial Sequence
  SAMD9L targeting guide sequence portion
agaagauacauauauauaugu

SEQ ID NO: 15847 - RNA, 21 nt, Artificial Sequence
  SAMD9L targeting guide sequence portion
agaaguggguugaggaacagg

SEQ ID NO: 15848 - RNA, 21 nt, Artificial Sequence
  SAMD9L targeting guide sequence portion
agaaucuuaaguaacauagaa

SEQ ID NO: 15849 - RNA, 21 nt, Artificial Sequence
  SAMD9L targeting guide sequence portion
agaauuauacuuuauuuuuaa

SEQ ID NO: 15850 - RNA, 21 nt, Artificial Sequence
  SAMD9L targeting guide sequence portion
agaauuauuauaaggcuaaaa

SEQ ID NO: 15851 - RNA, 21 nt, Artificial Sequence
  SAMD9L targeting guide sequence portion
agacaaagcaauauaauaagu

SEQ ID NO: 15852 - RNA, 21 nt, Artificial Sequence
  SAMD9L targeting guide sequence portion
agacaauuauguauacauuau

SEQ ID NO: 15853 - RNA, 21 nt, Artificial Sequence
  SAMD9L targeting guide sequence portion
agagcaguugguuaaauaauc

SEQ ID NO: 15854 - RNA, 21 nt, Artificial Sequence
  SAMD9L targeting guide sequence portion
agagucaccuaagaaacaagg

SEQ ID NO: 15855 - RNA, 21 nt, Artificial Sequence
  SAMD9L targeting guide sequence portion
agagucagccuuuagcaauau

SEQ ID NO: 15856 - RNA, 21 nt, Artificial Sequence
  SAMD9L targeting guide sequence portion
agauacauauauauauguaua

SEQ ID NO: 15857 - RNA, 21 nt, Artificial Sequence
  SAMD9L targeting guide sequence portion
agauagccagcuguggauucc

SEQ ID NO: 15858 - RNA, 21 nt, Artificial Sequence
  SAMD9L targeting guide sequence portion
agauuauuuaaccaacugcuc

SEQ ID NO: 15859 - RNA, 21 nt, Artificial Sequence
  SAMD9L targeting guide sequence portion
agauucugcuuuuaagucaca

SEQ ID NO: 15860 - RNA, 21 nt, Artificial Sequence
  SAMD9L targeting guide sequence portion
agcaauauaauaaguauuuua

SEQ ID NO: 15861 - RNA, 21 nt, Artificial Sequence
  SAMD9L targeting guide sequence portion
agcaauauuauacauauauau

SEQ ID NO: 15862 - RNA, 21 nt, Artificial Sequence
  SAMD9L targeting guide sequence portion
agcagaaucuuaaguaacaua

SEQ ID NO: 15863 - RNA, 21 nt, Artificial Sequence
  SAMD9L targeting guide sequence portion
agcagcuauagcuuauuucau

SEQ ID NO: 15864 - RNA, 21 nt, Artificial Sequence
  SAMD9L targeting guide sequence portion
agcaguugguuaaauaaucug

SEQ ID NO: 15865 - RNA, 21 nt, Artificial Sequence
  SAMD9L targeting guide sequence portion
agcaguuuuaagagucagccu

SEQ ID NO: 15866 - RNA, 21 nt, Artificial Sequence
  SAMD9L targeting guide sequence portion
agcauauaggaauauugcaaa

SEQ ID NO: 15867 - RNA, 21 nt, Artificial Sequence
  SAMD9L targeting guide sequence portion
agccagcuguggauuccuguu

SEQ ID NO: 15868 - RNA, 21 nt, Artificial Sequence
  SAMD9L targeting guide sequence portion
agccuuauaauaauucucccu

SEQ ID NO: 15869 - RNA, 21 nt, Artificial Sequence
  SAMD9L targeting guide sequence portion
agccuuuagcaauauuauaca

SEQ ID NO: 15870 - RNA, 21 nt, Artificial Sequence
  SAMD9L targeting guide sequence portion
agcuaaaagggagaauuauua

SEQ ID NO: 15871 - RNA, 21 nt, Artificial Sequence
  SAMD9L targeting guide sequence portion
agcuaaaguaaguaucaagca

SEQ ID NO: 15872 - RNA, 21 nt, Artificial Sequence
  SAMD9L targeting guide sequence portion
agcuauagcugcuaacuggug

SEQ ID NO: 15873 - RNA, 21 nt, Artificial Sequence
  SAMD9L targeting guide sequence portion
agcuauagcuuauuucauaau

SEQ ID NO: 15874 - RNA, 21 nt, Artificial Sequence
  SAMD9L targeting guide sequence portion
agcuauuuuaccauccuaauu

SEQ ID NO: 15875 - RNA, 21 nt, Artificial Sequence
  SAMD9L targeting guide sequence portion
agcugcuaacuggugacacac

SEQ ID NO: 15876 - RNA, 21 nt, Artificial Sequence
  SAMD9L targeting guide sequence portion
agcuggcuaucuuuguuacau

SEQ ID NO: 15877 - RNA, 21 nt, Artificial Sequence
  SAMD9L targeting guide sequence portion
agcuguggauuccuguuccuc

SEQ ID NO: 15878 - RNA, 21 nt, Artificial Sequence
  SAMD9L targeting guide sequence portion
agcuuaacuuggugaaaguug

SEQ ID NO: 15879 - RNA, 21 nt, Artificial Sequence
  SAMD9L targeting guide sequence portion
agcuuauuucauaauuacaau

SEQ ID NO: 15880 - RNA, 21 nt, Artificial Sequence
  SAMD9L targeting guide sequence portion
agcuugaguuccaaaagaaaa

SEQ ID NO: 15881 - RNA, 21 nt, Artificial Sequence
  SAMD9L targeting guide sequence portion
aggaacaggaauccacagcug

SEQ ID NO: 15882 - RNA, 21 nt, Artificial Sequence
  SAMD9L targeting guide sequence portion
aggaauauugcaaauaaacuu

SEQ ID NO: 15883 - RNA, 21 nt, Artificial Sequence
  SAMD9L targeting guide sequence portion
aggaauccacagcuggcuauc

SEQ ID NO: 15884 - RNA, 21 nt, Artificial Sequence
  SAMD9L targeting guide sequence portion
aggaugguaaaauagcuaaag

SEQ ID NO: 15885 - RNA, 21 nt, Artificial Sequence
  SAMD9L targeting guide sequence portion
aggcuaaaaggugugucacca

SEQ ID NO: 15886 - RNA, 21 nt, Artificial Sequence
  SAMD9L targeting guide sequence portion
aggcugacucuuaaaacugcu

SEQ ID NO: 15887 - RNA, 21 nt, Artificial Sequence
  SAMD9L targeting guide sequence portion
agggagaauuauuauaaggcu

SEQ ID NO: 15888 - RNA, 21 nt, Artificial Sequence
  SAMD9L targeting guide sequence portion
aggguaugaauuaggauggua

SEQ ID NO: 15889 - RNA, 21 nt, Artificial Sequence
  SAMD9L targeting guide sequence portion
agguagaaguggguugaggaa

SEQ ID NO: 15890 - RNA, 21 nt, Artificial Sequence
  SAMD9L targeting guide sequence portion
aggugacucuaauuguaauua

SEQ ID NO: 15891 - RNA, 21 nt, Artificial Sequence
  SAMD9L targeting guide sequence portion
aggugugucaccaguuagcag

SEQ ID NO: 15892 - RNA, 21 nt, Artificial Sequence
  SAMD9L targeting guide sequence portion
aguaacagagcaguugguuaa

SEQ ID NO: 15893 - RNA, 21 nt, Artificial Sequence
  SAMD9L targeting guide sequence portion
aguaacauagaaauugguuuc

SEQ ID NO: 15894 - RNA, 21 nt, Artificial Sequence
  SAMD9L targeting guide sequence portion
aguaaguaucaagcaguuuua

SEQ ID NO: 15895 - RNA, 21 nt, Artificial Sequence
  SAMD9L targeting guide sequence portion
aguauaauucuaaaauacuua

SEQ ID NO: 15896 - RNA, 21 nt, Artificial Sequence
  SAMD9L targeting guide sequence portion
aguaucaagcaguuuuaagag

SEQ ID NO: 15897 - RNA, 21 nt, Artificial Sequence
  SAMD9L targeting guide sequence portion
aguauuuuagaauuauacuuu

SEQ ID NO: 15898 - RNA, 21 nt, Artificial Sequence
  SAMD9L targeting guide sequence portion
agucacaaaaccccaacuuuc

SEQ ID NO: 15899 - RNA, 21 nt, Artificial Sequence
  SAMD9L targeting guide sequence portion
agucaccuaagaaacaagggu

SEQ ID NO: 15900 - RNA, 21 nt, Artificial Sequence
  SAMD9L targeting guide sequence portion
agucagccuuuagcaauauua

SEQ ID NO: 15901 - RNA, 21 nt, Artificial Sequence
  SAMD9L targeting guide sequence portion
aguggguugaggaacaggaau

SEQ ID NO: 15902 - RNA, 21 nt, Artificial Sequence
  SAMD9L targeting guide sequence portion
aguuaagcuaaaagggagaau

SEQ ID NO: 15903 - RNA, 21 nt, Artificial Sequence
  SAMD9L targeting guide sequence portion
aguuagcagcuauagcuuauu

SEQ ID NO: 15904 - RNA, 21 nt, Artificial Sequence
  SAMD9L targeting guide sequence portion
aguuccaaaagaaaacagauu

SEQ ID NO: 15905 - RNA, 21 nt, Artificial Sequence
  SAMD9L targeting guide sequence portion
aguugggguuuugugacuuaa

SEQ ID NO: 15906 - RNA, 21 nt, Artificial Sequence
  SAMD9L targeting guide sequence portion
aguugguuaaauaaucuguuu

SEQ ID NO: 15907 - RNA, 21 nt, Artificial Sequence
  SAMD9L targeting guide sequence portion
aguuuauuugcaauauuccua

SEQ ID NO: 15908 - RNA, 21 nt, Artificial Sequence
  SAMD9L targeting guide sequence portion
aguuucauuauuuuaaaguuu

SEQ ID NO: 15909 - RNA, 21 nt, Artificial Sequence
  SAMD9L targeting guide sequence portion
aguuuuaagagucagccuuua

SEQ ID NO: 15910 - RNA, 21 nt, Artificial Sequence
  SAMD9L targeting guide sequence portion
auaaacuuuaaaauaaugaaa

SEQ ID NO: 15911 - RNA, 21 nt, Artificial Sequence
  SAMD9L targeting guide sequence portion
auaaaguauaauucuaaaaua

SEQ ID NO: 15912 - RNA, 21 nt, Artificial Sequence
  SAMD9L targeting guide sequence portion
auaagcuauagcugcuaacug

SEQ ID NO: 15913 - RNA, 21 nt, Artificial Sequence
  SAMD9L targeting guide sequence portion
auaaggcuaaaagguguguca

SEQ ID NO: 15914 - RNA, 21 nt, Artificial Sequence
  SAMD9L targeting guide sequence portion
auaaguauuuuagaauuauac

SEQ ID NO: 15915 - RNA, 21 nt, Artificial Sequence
  SAMD9L targeting guide sequence portion
auaauaaguauuuuagaauua

SEQ ID NO: 15916 - RNA, 21 nt, Artificial Sequence
  SAMD9L targeting guide sequence portion
auaauaauucucccuuuuagc

SEQ ID NO: 15917 - RNA, 21 nt, Artificial Sequence
  SAMD9L targeting guide sequence portion
auaauauugcuaaaggcugac

SEQ ID NO: 15918 - RNA, 21 nt, Artificial Sequence
  SAMD9L targeting guide sequence portion
auaaucuguuuucuuuuggaa

SEQ ID NO: 15919 - RNA, 21 nt, Artificial Sequence
  SAMD9L targeting guide sequence portion
auaaugaaacuggauagguag

SEQ ID NO: 15920 - RNA, 21 nt, Artificial Sequence
  SAMD9L targeting guide sequence portion
auaauguauacauaauugucu

SEQ ID NO: 15921 - RNA, 21 nt, Artificial Sequence
  SAMD9L targeting guide sequence portion
auaauuacaauuagagucacc

SEQ ID NO: 15922 - RNA, 21 nt, Artificial Sequence
  SAMD9L targeting guide sequence portion
auaauucuaaaauacuuauua

SEQ ID NO: 15923 - RNA, 21 nt, Artificial Sequence
  SAMD9L targeting guide sequence portion
auaauucucccuuuuagcuua

SEQ ID NO: 15924 - RNA, 21 nt, Artificial Sequence
  SAMD9L targeting guide sequence portion
auaauugucuaugugauuuua

SEQ ID NO: 15925 - RNA, 21 nt, Artificial Sequence
  SAMD9L targeting guide sequence portion
auacagaagauacauauauau

SEQ ID NO: 15926 - RNA, 21 nt, Artificial Sequence
  SAMD9L targeting guide sequence portion
auacauaauugucuaugugau

SEQ ID NO: 15927 - RNA, 21 nt, Artificial Sequence
  SAMD9L targeting guide sequence portion
auacauauauauauguauaau

SEQ ID NO: 15928 - RNA, 21 nt, Artificial Sequence
  SAMD9L targeting guide sequence portion
auacauauauauauguaucuu

SEQ ID NO: 15929 - RNA, 21 nt, Artificial Sequence
  SAMD9L targeting guide sequence portion
auacauuaucauacagaagau

SEQ ID NO: 15930 - RNA, 21 nt, Artificial Sequence
  SAMD9L targeting guide sequence portion
auacccuuguuucuuagguga

SEQ ID NO: 15931 - RNA, 21 nt, Artificial Sequence
  SAMD9L targeting guide sequence portion
auacuuacuuuagcuauuuua

SEQ ID NO: 15932 - RNA, 21 nt, Artificial Sequence
  SAMD9L targeting guide sequence portion
auacuuuauuuuuaaaaucac

SEQ ID NO: 15933 - RNA, 21 nt, Artificial Sequence
  SAMD9L targeting guide sequence portion
auagaaauugguuuccguagc

SEQ ID NO: 15934 - RNA, 21 nt, Artificial Sequence
  SAMD9L targeting guide sequence portion
auagacaauuauguauacauu

SEQ ID NO: 15935 - RNA, 21 nt, Artificial Sequence
  SAMD9L targeting guide sequence portion
auagccagcuguggauuccug

SEQ ID NO: 15936 - RNA, 21 nt, Artificial Sequence
  SAMD9L targeting guide sequence portion
auagcuaaaguaaguaucaag

SEQ ID NO: 15937 - RNA, 21 nt, Artificial Sequence
  SAMD9L targeting guide sequence portion
auagcugcuaacuggugacac

SEQ ID NO: 15938 - RNA, 21 nt, Artificial Sequence
  SAMD9L targeting guide sequence portion
auagcuuauuucauaauuaca

SEQ ID NO: 15939 - RNA, 21 nt, Artificial Sequence
  SAMD9L targeting guide sequence portion
auaggaauauugcaaauaaac

SEQ ID NO: 15940 - RNA, 21 nt, Artificial Sequence
  SAMD9L targeting guide sequence portion
auagguagaaguggguugagg

SEQ ID NO: 15941 - RNA, 21 nt, Artificial Sequence
  SAMD9L targeting guide sequence portion
auaguaacagagcaguugguu

SEQ ID NO: 15942 - RNA, 21 nt, Artificial Sequence
  SAMD9L targeting guide sequence portion
auauaauaaguauuuuagaau

SEQ ID NO: 15943 - RNA, 21 nt, Artificial Sequence
  SAMD9L targeting guide sequence portion
auauaggaauauugcaaauaa

SEQ ID NO: 15944 - RNA, 21 nt, Artificial Sequence
  SAMD9L targeting guide sequence portion
auauauauauguauaauauug

SEQ ID NO: 15945 - RNA, 21 nt, Artificial Sequence
  SAMD9L targeting guide sequence portion
auauauauauguaucuucugu

SEQ ID NO: 15946 - RNA, 21 nt, Artificial Sequence
  SAMD9L targeting guide sequence portion
auauauauguauaauauugcu

SEQ ID NO: 15947 - RNA, 21 nt, Artificial Sequence
  SAMD9L targeting guide sequence portion
auauauauguaucuucuguau

SEQ ID NO: 15948 - RNA, 21 nt, Artificial Sequence
  SAMD9L targeting guide sequence portion
auauauguauaauauugcuaa

SEQ ID NO: 15949 - RNA, 21 nt, Artificial Sequence
  SAMD9L targeting guide sequence portion
auauauguaucuucuguauga

SEQ ID NO: 15950 - RNA, 21 nt, Artificial Sequence
  SAMD9L targeting guide sequence portion
auaugcuacggaaaccaauuu

SEQ ID NO: 15951 - RNA, 21 nt, Artificial Sequence
  SAMD9L targeting guide sequence portion
auauguauaauauugcuaaag

SEQ ID NO: 15952 - RNA, 21 nt, Artificial Sequence
  SAMD9L targeting guide sequence portion
auauguaucuucuguaugaua

SEQ ID NO: 15953 - RNA, 21 nt, Artificial Sequence
  SAMD9L targeting guide sequence portion
auauuauacauauauauaugu

SEQ ID NO: 15954 - RNA, 21 nt, Artificial Sequence
  SAMD9L targeting guide sequence portion
auauuccuauaugcuacggaa

SEQ ID NO: 15955 - RNA, 21 nt, Artificial Sequence
  SAMD9L targeting guide sequence portion
auauugcaaauaaacuuuaaa

SEQ ID NO: 15956 - RNA, 21 nt, Artificial Sequence
  SAMD9L targeting guide sequence portion
auauugcuaaaggcugacucu

SEQ ID NO: 15957 - RNA, 21 nt, Artificial Sequence
  SAMD9L targeting guide sequence portion
aucaagcaguuuuaagaguca

SEQ ID NO: 15958 - RNA, 21 nt, Artificial Sequence
  SAMD9L targeting guide sequence portion
aucacauagacaauuauguau

SEQ ID NO: 15959 - RNA, 21 nt, Artificial Sequence
  SAMD9L targeting guide sequence portion
aucauacagaagauacauaua

SEQ ID NO: 15960 - RNA, 21 nt, Artificial Sequence
  SAMD9L targeting guide sequence portion
auccacagcuggcuaucuuug

SEQ ID NO: 15961 - RNA, 21 nt, Artificial Sequence
  SAMD9L targeting guide sequence portion
auccaguuucauuauuuuaaa

SEQ ID NO: 15962 - RNA, 21 nt, Artificial Sequence
  SAMD9L targeting guide sequence portion
auccuaauucauacccuuguu

SEQ ID NO: 15963 - RNA, 21 nt, Artificial Sequence
  SAMD9L targeting guide sequence portion
aucuguuuucuuuuggaacuc

SEQ ID NO: 15964 - RNA, 21 nt, Artificial Sequence
  SAMD9L targeting guide sequence portion
aucuuaaguaacauagaaauu

SEQ ID NO: 15965 - RNA, 21 nt, Artificial Sequence
  SAMD9L targeting guide sequence portion
aucuucuguaugauaauguau

SEQ ID NO: 15966 - RNA, 21 nt, Artificial Sequence
  SAMD9L targeting guide sequence portion
aucuuuguuacauaguaacag

SEQ ID NO: 15967 - RNA, 21 nt, Artificial Sequence
  SAMD9L targeting guide sequence portion
augaaacuggauagguagaag

SEQ ID NO: 15968 - RNA, 21 nt, Artificial Sequence
  SAMD9L targeting guide sequence portion
augaaauaagcuauagcugcu

SEQ ID NO: 15969 - RNA, 21 nt, Artificial Sequence
  SAMD9L targeting guide sequence portion
augaauuaggaugguaaaaua

SEQ ID NO: 15970 - RNA, 21 nt, Artificial Sequence
  SAMD9L targeting guide sequence portion
augauaauguauacauaauug

SEQ ID NO: 15971 - RNA, 21 nt, Artificial Sequence
  SAMD9L targeting guide sequence portion
augcuacggaaaccaauuucu

SEQ ID NO: 15972 - RNA, 21 nt, Artificial Sequence
  SAMD9L targeting guide sequence portion
augguaaaauagcuaaaguaa

SEQ ID NO: 15973 - RNA, 21 nt, Artificial Sequence
  SAMD9L targeting guide sequence portion
auguaacaaagauagccagcu

SEQ ID NO: 15974 - RNA, 21 nt, Artificial Sequence
  SAMD9L targeting guide sequence portion
auguauaauauugcuaaaggc

SEQ ID NO: 15975 - RNA, 21 nt, Artificial Sequence
  SAMD9L targeting guide sequence portion
auguauacauaauugucuaug

SEQ ID NO: 15976 - RNA, 21 nt, Artificial Sequence
  SAMD9L targeting guide sequence portion
auguauacauuaucauacaga

SEQ ID NO: 15977 - RNA, 21 nt, Artificial Sequence
  SAMD9L targeting guide sequence portion
auguaucuucuguaugauaau

SEQ ID NO: 15978 - RNA, 21 nt, Artificial Sequence
  SAMD9L targeting guide sequence portion
augugauuuuaaaaauaaagu

SEQ ID NO: 15979 - RNA, 21 nt, Artificial Sequence
  SAMD9L targeting guide sequence portion
auguuacuuaagauucugcuu

SEQ ID NO: 15980 - RNA, 21 nt, Artificial Sequence
  SAMD9L targeting guide sequence portion
auuacaauuagagucaccuaa

SEQ ID NO: 15981 - RNA, 21 nt, Artificial Sequence
  SAMD9L targeting guide sequence portion
auuagagucaccuaagaaaca

SEQ ID NO: 15982 - RNA, 21 nt, Artificial Sequence
  SAMD9L targeting guide sequence portion
auuaggaugguaaaauagcua

SEQ ID NO: 15983 - RNA, 21 nt, Artificial Sequence
  SAMD9L targeting guide sequence portion
auuauaaggcuaaaaggugug

SEQ ID NO: 15984 - RNA, 21 nt, Artificial Sequence
  SAMD9L targeting guide sequence portion
auuauacauauauauauguau

SEQ ID NO: 15985 - RNA, 21 nt, Artificial Sequence
  SAMD9L targeting guide sequence portion
auuauacuuuauuuuuaaaau

SEQ ID NO: 15986 - RNA, 21 nt, Artificial Sequence
  SAMD9L targeting guide sequence portion
auuaucauacagaagauacau

SEQ ID NO: 15987 - RNA, 21 nt, Artificial Sequence
  SAMD9L targeting guide sequence portion
auuaugaaauaagcuauagcu

SEQ ID NO: 15988 - RNA, 21 nt, Artificial Sequence
  SAMD9L targeting guide sequence portion
auuauguauacauuaucauac

SEQ ID NO: 15989 - RNA, 21 nt, Artificial Sequence
  SAMD9L targeting guide sequence portion
auuauuauaaggcuaaaaggu

SEQ ID NO: 15990 - RNA, 21 nt, Artificial Sequence
  SAMD9L targeting guide sequence portion
auuauuuaaccaacugcucug

SEQ ID NO: 15991 - RNA, 21 nt, Artificial Sequence
  SAMD9L targeting guide sequence portion
auuauuuuaaaguuuauuugc

SEQ ID NO: 15992 - RNA, 21 nt, Artificial Sequence
  SAMD9L targeting guide sequence portion
auucauacccuuguuucuuag

SEQ ID NO: 15993 - RNA, 21 nt, Artificial Sequence
  SAMD9L targeting guide sequence portion
auuccuauaugcuacggaaac

SEQ ID NO: 15994 - RNA, 21 nt, Artificial Sequence
  SAMD9L targeting guide sequence portion
auuccuguuccucaacccacu

SEQ ID NO: 15995 - RNA, 21 nt, Artificial Sequence
  SAMD9L targeting guide sequence portion
auucuaaaauacuuauuauau

SEQ ID NO: 15996 - RNA, 21 nt, Artificial Sequence
  SAMD9L targeting guide sequence portion
auucucccuuuuagcuuaacu

SEQ ID NO: 15997 - RNA, 21 nt, Artificial Sequence
  SAMD9L targeting guide sequence portion
auucugcuuuuaagucacaaa

SEQ ID NO: 15998 - RNA, 21 nt, Artificial Sequence
  SAMD9L targeting guide sequence portion
auugcaaauaaacuuuaaaau

SEQ ID NO: 15999 - RNA, 21 nt, Artificial Sequence
  SAMD9L targeting guide sequence portion
auugcuaaaggcugacucuua

SEQ ID NO: 16000 - RNA, 21 nt, Artificial Sequence
  SAMD9L targeting guide sequence portion
auugguuuccguagcauauag

SEQ ID NO: 16001 - RNA, 21 nt, Artificial Sequence
  SAMD9L targeting guide sequence portion
auuguaauuaugaaauaagcu

SEQ ID NO: 16002 - RNA, 21 nt, Artificial Sequence
  SAMD9L targeting guide sequence portion
auugucuaugugauuuuaaaa

SEQ ID NO: 16003 - RNA, 21 nt, Artificial Sequence
  SAMD9L targeting guide sequence portion
auuuaaccaacugcucuguua

SEQ ID NO: 16004 - RNA, 21 nt, Artificial Sequence
  SAMD9L targeting guide sequence portion
auuucauaauuacaauuagag

SEQ ID NO: 16005 - RNA, 21 nt, Artificial Sequence
  SAMD9L targeting guide sequence portion
auuucuauguuacuuaagauu

SEQ ID NO: 16006 - RNA, 21 nt, Artificial Sequence
  SAMD9L targeting guide sequence portion
auuugcaauauuccuauaugc

SEQ ID NO: 16007 - RNA, 21 nt, Artificial Sequence
  SAMD9L targeting guide sequence portion
auuuuaaaaauaaaguauaau

SEQ ID NO: 16008 - RNA, 21 nt, Artificial Sequence
  SAMD9L targeting guide sequence portion
auuuuaaaguuuauuugcaau

SEQ ID NO: 16009 - RNA, 21 nt, Artificial Sequence
  SAMD9L targeting guide sequence portion
auuuuaccauccuaauucaua

SEQ ID NO: 16010 - RNA, 21 nt, Artificial Sequence
  SAMD9L targeting guide sequence portion
auuuuagaauuauacuuuauu

SEQ ID NO: 16011 - RNA, 21 nt, Artificial Sequence
  SAMD9L targeting guide sequence portion
auuuuuaaaaucacauagaca

SEQ ID NO: 16012 - RNA, 21 nt, Artificial Sequence
  SAMD9L targeting guide sequence portion
caaaaccccaacuuucaccaa

SEQ ID NO: 16013 - RNA, 21 nt, Artificial Sequence
  SAMD9L targeting guide sequence portion
caaaagaaaacagauuauuua

SEQ ID NO: 16014 - RNA, 21 nt, Artificial Sequence
  SAMD9L targeting guide sequence portion
caaagauagccagcuguggau

SEQ ID NO: 16015 - RNA, 21 nt, Artificial Sequence
  SAMD9L targeting guide sequence portion
caaagcaauauaauaaguauu

SEQ ID NO: 16016 - RNA, 21 nt, Artificial Sequence
  SAMD9L targeting guide sequence portion
caaauaaacuuuaaaauaaug

SEQ ID NO: 16017 - RNA, 21 nt, Artificial Sequence
  SAMD9L targeting guide sequence portion
caacccacuucuaccuaucca

SEQ ID NO: 16018 - RNA, 21 nt, Artificial Sequence
  SAMD9L targeting guide sequence portion
caacugcucuguuacuaugua

SEQ ID NO: 16019 - RNA, 21 nt, Artificial Sequence
  SAMD9L targeting guide sequence portion
caacuuucaccaaguuaagcu

SEQ ID NO: 16020 - RNA, 21 nt, Artificial Sequence
  SAMD9L targeting guide sequence portion
caagcaguuuuaagagucagc

SEQ ID NO: 16021 - RNA, 21 nt, Artificial Sequence
  SAMD9L targeting guide sequence portion
caaggguaugaauuaggaugg

SEQ ID NO: 16022 - RNA, 21 nt, Artificial Sequence
  SAMD9L targeting guide sequence portion
caaguuaagcuaaaagggaga

SEQ ID NO: 16023 - RNA, 21 nt, Artificial Sequence
  SAMD9L targeting guide sequence portion
caauauaauaaguauuuuaga

SEQ ID NO: 16024 - RNA, 21 nt, Artificial Sequence
  SAMD9L targeting guide sequence portion
caauauuauacauauauauau

SEQ ID NO: 16025 - RNA, 21 nt, Artificial Sequence
  SAMD9L targeting guide sequence portion
caauauuccuauaugcuacgg

SEQ ID NO: 16026 - RNA, 21 nt, Artificial Sequence
  SAMD9L targeting guide sequence portion
caauuagagucaccuaagaaa

SEQ ID NO: 16027 - RNA, 21 nt, Artificial Sequence
  SAMD9L targeting guide sequence portion
caauuauguauacauuaucau

SEQ ID NO: 16028 - RNA, 21 nt, Artificial Sequence
  SAMD9L targeting guide sequence portion
caauuucuauguuacuuaaga

SEQ ID NO: 16029 - RNA, 21 nt, Artificial Sequence
  SAMD9L targeting guide sequence portion
cacaaaaccccaacuuucacc

SEQ ID NO: 16030 - RNA, 21 nt, Artificial Sequence
  SAMD9L targeting guide sequence portion
cacaccuuuuagccuuauaau

SEQ ID NO: 16031 - RNA, 21 nt, Artificial Sequence
  SAMD9L targeting guide sequence portion
cacagcuggcuaucuuuguua

SEQ ID NO: 16032 - RNA, 21 nt, Artificial Sequence
  SAMD9L targeting guide sequence portion
cacauagacaauuauguauac

SEQ ID NO: 16033 - RNA, 21 nt, Artificial Sequence
  SAMD9L targeting guide sequence portion
caccaaguuaagcuaaaaggg

SEQ ID NO: 16034 - RNA, 21 nt, Artificial Sequence
  SAMD9L targeting guide sequence portion
caccaguuagcagcuauagcu

SEQ ID NO: 16035 - RNA, 21 nt, Artificial Sequence
  SAMD9L targeting guide sequence portion
caccuaagaaacaaggguaug

SEQ ID NO: 16036 - RNA, 21 nt, Artificial Sequence
  SAMD9L targeting guide sequence portion
caccuuuuagccuuauaauaa

SEQ ID NO: 16037 - RNA, 21 nt, Artificial Sequence
  SAMD9L targeting guide sequence portion
cacuucuaccuauccaguuuc

SEQ ID NO: 16038 - RNA, 21 nt, Artificial Sequence
  SAMD9L targeting guide sequence portion
cagaagauacauauauauaug

SEQ ID NO: 16039 - RNA, 21 nt, Artificial Sequence
  SAMD9L targeting guide sequence portion
cagaaucuuaaguaacauaga

SEQ ID NO: 16040 - RNA, 21 nt, Artificial Sequence
  SAMD9L targeting guide sequence portion
cagagcaguugguuaaauaau

SEQ ID NO: 16041 - RNA, 21 nt, Artificial Sequence
  SAMD9L targeting guide sequence portion
cagauuauuuaaccaacugcu

SEQ ID NO: 16042 - RNA, 21 nt, Artificial Sequence
  SAMD9L targeting guide sequence portion
cagccuuuagcaauauuauac

SEQ ID NO: 16043 - RNA, 21 nt, Artificial Sequence
  SAMD9L targeting guide sequence portion
cagcuauagcuuauuucauaa

SEQ ID NO: 16044 - RNA, 21 nt, Artificial Sequence
  SAMD9L targeting guide sequence portion
cagcuggcuaucuuuguuaca

SEQ ID NO: 16045 - RNA, 21 nt, Artificial Sequence
  SAMD9L targeting guide sequence portion
cagcuguggauuccuguuccu

SEQ ID NO: 16046 - RNA, 21 nt, Artificial Sequence
  SAMD9L targeting guide sequence portion
cagcuugaguuccaaaagaaa

SEQ ID NO: 16047 - RNA, 21 nt, Artificial Sequence
  SAMD9L targeting guide sequence portion
caggaauccacagcuggcuau

SEQ ID NO: 16048 - RNA, 21 nt, Artificial Sequence
  SAMD9L targeting guide sequence portion
caguuagcagcuauagcuuau

SEQ ID NO: 16049 - RNA, 21 nt, Artificial Sequence
  SAMD9L targeting guide sequence portion
caguugguuaaauaaucuguu

SEQ ID NO: 16050 - RNA, 21 nt, Artificial Sequence
  SAMD9L targeting guide sequence portion
caguuucauuauuuuaaaguu

SEQ ID NO: 16051 - RNA, 21 nt, Artificial Sequence
  SAMD9L targeting guide sequence portion
caguuuuaagagucagccuuu

SEQ ID NO: 16052 - RNA, 21 nt, Artificial Sequence
  SAMD9L targeting guide sequence portion
cauaauuacaauuagagucac

SEQ ID NO: 16053 - RNA, 21 nt, Artificial Sequence
  SAMD9L targeting guide sequence portion
cauaauugucuaugugauuuu

SEQ ID NO: 16054 - RNA, 21 nt, Artificial Sequence
  SAMD9L targeting guide sequence portion
cauacagaagauacauauaua

SEQ ID NO: 16055 - RNA, 21 nt, Artificial Sequence
  SAMD9L targeting guide sequence portion
cauacccuuguuucuuaggug

SEQ ID NO: 16056 - RNA, 21 nt, Artificial Sequence
  SAMD9L targeting guide sequence portion
cauagaaauugguuuccguag

SEQ ID NO: 16057 - RNA, 21 nt, Artificial Sequence
  SAMD9L targeting guide sequence portion
cauagacaauuauguauacau

SEQ ID NO: 16058 - RNA, 21 nt, Artificial Sequence
  SAMD9L targeting guide sequence portion
cauaguaacagagcaguuggu

SEQ ID NO: 16059 - RNA, 21 nt, Artificial Sequence
  SAMD9L targeting guide sequence portion
cauauaggaauauugcaaaua

SEQ ID NO: 16060 - RNA, 21 nt, Artificial Sequence
  SAMD9L targeting guide sequence portion
cauauauauauguauaauauu

SEQ ID NO: 16061 - RNA, 21 nt, Artificial Sequence
  SAMD9L targeting guide sequence portion
cauauauauauguaucuucug

SEQ ID NO: 16062 - RNA, 21 nt, Artificial Sequence
  SAMD9L targeting guide sequence portion
cauccuaauucauacccuugu

SEQ ID NO: 16063 - RNA, 21 nt, Artificial Sequence
  SAMD9L targeting guide sequence portion
cauuaucauacagaagauaca

SEQ ID NO: 16064 - RNA, 21 nt, Artificial Sequence
  SAMD9L targeting guide sequence portion
cauuauuuuaaaguuuauuug

SEQ ID NO: 16065 - RNA, 21 nt, Artificial Sequence
  SAMD9L targeting guide sequence portion
ccaaaagaaaacagauuauuu

SEQ ID NO: 16066 - RNA, 21 nt, Artificial Sequence
  SAMD9L targeting guide sequence portion
ccaacugcucuguuacuaugu

SEQ ID NO: 16067 - RNA, 21 nt, Artificial Sequence
  SAMD9L targeting guide sequence portion
ccaacuuucaccaaguuaagc

SEQ ID NO: 16068 - RNA, 21 nt, Artificial Sequence
  SAMD9L targeting guide sequence portion
ccaaguuaagcuaaaagggag

SEQ ID NO: 16069 - RNA, 21 nt, Artificial Sequence
  SAMD9L targeting guide sequence portion
ccaauuucuauguuacuuaag

SEQ ID NO: 16070 - RNA, 21 nt, Artificial Sequence
  SAMD9L targeting guide sequence portion
ccacagcuggcuaucuuuguu

SEQ ID NO: 16071 - RNA, 21 nt, Artificial Sequence
  SAMD9L targeting guide sequence portion
ccacuucuaccuauccaguuu

SEQ ID NO: 16072 - RNA, 21 nt, Artificial Sequence
  SAMD9L targeting guide sequence portion
ccagcuguggauuccuguucc

SEQ ID NO: 16073 - RNA, 21 nt, Artificial Sequence
  SAMD9L targeting guide sequence portion
ccaguuagcagcuauagcuua

SEQ ID NO: 16074 - RNA, 21 nt, Artificial Sequence
  SAMD9L targeting guide sequence portion
ccaguuucauuauuuuaaagu

SEQ ID NO: 16075 - RNA, 21 nt, Artificial Sequence
  SAMD9L targeting guide sequence portion
ccauccuaauucauacccuug

SEQ ID NO: 16076 - RNA, 21 nt, Artificial Sequence
  SAMD9L targeting guide sequence portion
cccaacuuucaccaaguuaag

SEQ ID NO: 16077 - RNA, 21 nt, Artificial Sequence
  SAMD9L targeting guide sequence portion
cccacuucuaccuauccaguu

SEQ ID NO: 16078 - RNA, 21 nt, Artificial Sequence
  SAMD9L targeting guide sequence portion
ccccaacuuucaccaaguuaa

SEQ ID NO: 16079 - RNA, 21 nt, Artificial Sequence
  SAMD9L targeting guide sequence portion
cccuuguuucuuaggugacuc

SEQ ID NO: 16080 - RNA, 21 nt, Artificial Sequence
  SAMD9L targeting guide sequence portion
cccuuuuagcuuaacuuggug

SEQ ID NO: 16081 - RNA, 21 nt, Artificial Sequence
  SAMD9L targeting guide sequence portion
ccguagcauauaggaauauug

SEQ ID NO: 16082 - RNA, 21 nt, Artificial Sequence
  SAMD9L targeting guide sequence portion
ccuaagaaacaaggguaugaa

SEQ ID NO: 16083 - RNA, 21 nt, Artificial Sequence
  SAMD9L targeting guide sequence portion
ccuaauucauacccuuguuuc

SEQ ID NO: 16084 - RNA, 21 nt, Artificial Sequence
  SAMD9L targeting guide sequence portion
ccuauaugcuacggaaaccaa

SEQ ID NO: 16085 - RNA, 21 nt, Artificial Sequence
  SAMD9L targeting guide sequence portion
ccuauccaguuucauuauuuu

SEQ ID NO: 16086 - RNA, 21 nt, Artificial Sequence
  SAMD9L targeting guide sequence portion
ccucaacccacuucuaccuau

SEQ ID NO: 16087 - RNA, 21 nt, Artificial Sequence
  SAMD9L targeting guide sequence portion
ccuguuccucaacccacuucu

SEQ ID NO: 16088 - RNA, 21 nt, Artificial Sequence
  SAMD9L targeting guide sequence portion
ccuuauaauaauucucccuuu

SEQ ID NO: 16089 - RNA, 21 nt, Artificial Sequence
  SAMD9L targeting guide sequence portion
ccuuguuucuuaggugacucu

SEQ ID NO: 16090 - RNA, 21 nt, Artificial Sequence
  SAMD9L targeting guide sequence portion
ccuuuagcaauauuauacaua

SEQ ID NO: 16091 - RNA, 21 nt, Artificial Sequence
  SAMD9L targeting guide sequence portion
ccuuuuagccuuauaauaauu

SEQ ID NO: 16092 - RNA, 21 nt, Artificial Sequence
  SAMD9L targeting guide sequence portion
ccuuuuagcuuaacuugguga

SEQ ID NO: 16093 - RNA, 21 nt, Artificial Sequence
  SAMD9L targeting guide sequence portion
cggaaaccaauuucuauguua

SEQ ID NO: 16094 - RNA, 21 nt, Artificial Sequence
  SAMD9L targeting guide sequence portion
cguagcauauaggaauauugc

SEQ ID NO: 16095 - RNA, 21 nt, Artificial Sequence
  SAMD9L targeting guide sequence portion
cuaaaagggagaauuauuaua

SEQ ID NO: 16096 - RNA, 21 nt, Artificial Sequence
  SAMD9L targeting guide sequence portion
cuaaaaggugugucaccaguu

SEQ ID NO: 16097 - RNA, 21 nt, Artificial Sequence
  SAMD9L targeting guide sequence portion
cuaaaauacuuauuauauugc

SEQ ID NO: 16098 - RNA, 21 nt, Artificial Sequence
  SAMD9L targeting guide sequence portion
cuaaaggcugacucuuaaaac

SEQ ID NO: 16099 - RNA, 21 nt, Artificial Sequence
  SAMD9L targeting guide sequence portion
cuaaaguaaguaucaagcagu

SEQ ID NO: 16100 - RNA, 21 nt, Artificial Sequence
  SAMD9L targeting guide sequence portion
cuaacuggugacacaccuuuu

SEQ ID NO: 16101 - RNA, 21 nt, Artificial Sequence
  SAMD9L targeting guide sequence portion
cuaagaaacaaggguaugaau

SEQ ID NO: 16102 - RNA, 21 nt, Artificial Sequence
  SAMD9L targeting guide sequence portion
cuaauucauacccuuguuucu

SEQ ID NO: 16103 - RNA, 21 nt, Artificial Sequence
  SAMD9L targeting guide sequence portion
cuaauuguaauuaugaaauaa

SEQ ID NO: 16104 - RNA, 21 nt, Artificial Sequence
  SAMD9L targeting guide sequence portion
cuaccuauccaguuucauuau

SEQ ID NO: 16105 - RNA, 21 nt, Artificial Sequence
  SAMD9L targeting guide sequence portion
cuacggaaaccaauuucuaug

SEQ ID NO: 16106 - RNA, 21 nt, Artificial Sequence
  SAMD9L targeting guide sequence portion
cuauagcugcuaacuggugac

SEQ ID NO: 16107 - RNA, 21 nt, Artificial Sequence
  SAMD9L targeting guide sequence portion
cuauagcuuauuucauaauua

SEQ ID NO: 16108 - RNA, 21 nt, Artificial Sequence
  SAMD9L targeting guide sequence portion
cuauaugcuacggaaaccaau

SEQ ID NO: 16109 - RNA, 21 nt, Artificial Sequence
  SAMD9L targeting guide sequence portion
cuauccaguuucauuauuuua

SEQ ID NO: 16110 - RNA, 21 nt, Artificial Sequence
  SAMD9L targeting guide sequence portion
cuaucuuuguuacauaguaac

SEQ ID NO: 16111 - RNA, 21 nt, Artificial Sequence
  SAMD9L targeting guide sequence portion
cuauguaacaaagauagccag

SEQ ID NO: 16112 - RNA, 21 nt, Artificial Sequence
  SAMD9L targeting guide sequence portion
cuaugugauuuuaaaaauaaa

SEQ ID NO: 16113 - RNA, 21 nt, Artificial Sequence
  SAMD9L targeting guide sequence portion
cuauguuacuuaagauucugc

SEQ ID NO: 16114 - RNA, 21 nt, Artificial Sequence
  SAMD9L targeting guide sequence portion
cuauuuuaccauccuaauuca

SEQ ID NO: 16115 - RNA, 21 nt, Artificial Sequence
  SAMD9L targeting guide sequence portion
cucaacccacuucuaccuauc

SEQ ID NO: 16116 - RNA, 21 nt, Artificial Sequence
  SAMD9L targeting guide sequence portion
cucccuuuuagcuuaacuugg

SEQ ID NO: 16117 - RNA, 21 nt, Artificial Sequence
  SAMD9L targeting guide sequence portion
cucuaauuguaauuaugaaau

SEQ ID NO: 16118 - RNA, 21 nt, Artificial Sequence
  SAMD9L targeting guide sequence portion
cucuguuacuauguaacaaag

SEQ ID NO: 16119 - RNA, 21 nt, Artificial Sequence
  SAMD9L targeting guide sequence portion
cucuuaaaacugcuugauacu

SEQ ID NO: 16120 - RNA, 21 nt, Artificial Sequence
  SAMD9L targeting guide sequence portion
cugacucuuaaaacugcuuga

SEQ ID NO: 16121 - RNA, 21 nt, Artificial Sequence
  SAMD9L targeting guide sequence portion
cugagacaaagcaauauaaua

SEQ ID NO: 16122 - RNA, 21 nt, Artificial Sequence
  SAMD9L targeting guide sequence portion
cugcuaacuggugacacaccu

SEQ ID NO: 16123 - RNA, 21 nt, Artificial Sequence
  SAMD9L targeting guide sequence portion
cugcucuguuacuauguaaca

SEQ ID NO: 16124 - RNA, 21 nt, Artificial Sequence
  SAMD9L targeting guide sequence portion
cugcuugauacuuacuuuagc

SEQ ID NO: 16125 - RNA, 21 nt, Artificial Sequence
  SAMD9L targeting guide sequence portion
cugcuuuuaagucacaaaacc

SEQ ID NO: 16126 - RNA, 21 nt, Artificial Sequence
  SAMD9L targeting guide sequence portion
cuggauagguagaaguggguu

SEQ ID NO: 16127 - RNA, 21 nt, Artificial Sequence
  SAMD9L targeting guide sequence portion
cuggcuaucuuuguuacauag

SEQ ID NO: 16128 - RNA, 21 nt, Artificial Sequence
  SAMD9L targeting guide sequence portion
cuggugacacaccuuuuagcc

SEQ ID NO: 16129 - RNA, 21 nt, Artificial Sequence
  SAMD9L targeting guide sequence portion
cuguaugauaauguauacaua

SEQ ID NO: 16130 - RNA, 21 nt, Artificial Sequence
  SAMD9L targeting guide sequence portion
cuguggauuccuguuccucaa

SEQ ID NO: 16131 - RNA, 21 nt, Artificial Sequence
  SAMD9L targeting guide sequence portion
cuguuacuauguaacaaagau

SEQ ID NO: 16132 - RNA, 21 nt, Artificial Sequence
  SAMD9L targeting guide sequence portion
cuguuccucaacccacuucua

SEQ ID NO: 16133 - RNA, 21 nt, Artificial Sequence
  SAMD9L targeting guide sequence portion
cuguuuucuuuuggaacucaa

SEQ ID NO: 16134 - RNA, 21 nt, Artificial Sequence
  SAMD9L targeting guide sequence portion
cuuaaaacugcuugauacuua

SEQ ID NO: 16135 - RNA, 21 nt, Artificial Sequence
  SAMD9L targeting guide sequence portion
cuuaaaagcagaaucuuaagu

SEQ ID NO: 16136 - RNA, 21 nt, Artificial Sequence
  SAMD9L targeting guide sequence portion
cuuaacuuggugaaaguuggg

SEQ ID NO: 16137 - RNA, 21 nt, Artificial Sequence
  SAMD9L targeting guide sequence portion
cuuaagauucugcuuuuaagu

SEQ ID NO: 16138 - RNA, 21 nt, Artificial Sequence
  SAMD9L targeting guide sequence portion
cuuaaguaacauagaaauugg

SEQ ID NO: 16139 - RNA, 21 nt, Artificial Sequence
  SAMD9L targeting guide sequence portion
cuuacuuuagcuauuuuacca

SEQ ID NO: 16140 - RNA, 21 nt, Artificial Sequence
  SAMD9L targeting guide sequence portion
cuuaggugacucuaauuguaa

SEQ ID NO: 16141 - RNA, 21 nt, Artificial Sequence
  SAMD9L targeting guide sequence portion
cuuauaauaauucucccuuuu

SEQ ID NO: 16142 - RNA, 21 nt, Artificial Sequence
  SAMD9L targeting guide sequence portion
cuuauuucauaauuacaauua

SEQ ID NO: 16143 - RNA, 21 nt, Artificial Sequence
  SAMD9L targeting guide sequence portion
cuucuaccuauccaguuucau

SEQ ID NO: 16144 - RNA, 21 nt, Artificial Sequence
  SAMD9L targeting guide sequence portion
cuucuguaugauaauguauac

SEQ ID NO: 16145 - RNA, 21 nt, Artificial Sequence
  SAMD9L targeting guide sequence portion
cuugaguuccaaaagaaaaca

SEQ ID NO: 16146 - RNA, 21 nt, Artificial Sequence
  SAMD9L targeting guide sequence portion
cuugauacuuacuuuagcuau

SEQ ID NO: 16147 - RNA, 21 nt, Artificial Sequence
  SAMD9L targeting guide sequence portion
cuuggugaaaguugggguuuu

SEQ ID NO: 16148 - RNA, 21 nt, Artificial Sequence
  SAMD9L targeting guide sequence portion
cuuguuucuuaggugacucua

SEQ ID NO: 16149 - RNA, 21 nt, Artificial Sequence
  SAMD9L targeting guide sequence portion
cuuuaaaauaaugaaacugga

SEQ ID NO: 16150 - RNA, 21 nt, Artificial Sequence
  SAMD9L targeting guide sequence portion
cuuuagcaauauuauacauau

SEQ ID NO: 16151 - RNA, 21 nt, Artificial Sequence
  SAMD9L targeting guide sequence portion
cuuuagcuauuuuaccauccu

SEQ ID NO: 16152 - RNA, 21 nt, Artificial Sequence
  SAMD9L targeting guide sequence portion
cuuuauuuuuaaaaucacaua

SEQ ID NO: 16153 - RNA, 21 nt, Artificial Sequence
  SAMD9L targeting guide sequence portion
cuuucaccaaguuaagcuaaa

SEQ ID NO: 16154 - RNA, 21 nt, Artificial Sequence
  SAMD9L targeting guide sequence portion
cuuuguuacauaguaacagag

SEQ ID NO: 16155 - RNA, 21 nt, Artificial Sequence
  SAMD9L targeting guide sequence portion
cuuuuaagucacaaaacccca

SEQ ID NO: 16156 - RNA, 21 nt, Artificial Sequence
  SAMD9L targeting guide sequence portion
cuuuuagccuuauaauaauuc

SEQ ID NO: 16157 - RNA, 21 nt, Artificial Sequence
  SAMD9L targeting guide sequence portion
cuuuuagcuuaacuuggugaa

SEQ ID NO: 16158 - RNA, 21 nt, Artificial Sequence
  SAMD9L targeting guide sequence portion
gaaaacagauuauuuaaccaa

SEQ ID NO: 16159 - RNA, 21 nt, Artificial Sequence
  SAMD9L targeting guide sequence portion
gaaacaaggguaugaauuagg

SEQ ID NO: 16160 - RNA, 21 nt, Artificial Sequence
  SAMD9L targeting guide sequence portion
gaaaccaauuucuauguuacu

SEQ ID NO: 16161 - RNA, 21 nt, Artificial Sequence
  SAMD9L targeting guide sequence portion
gaaacuggauagguagaagug

SEQ ID NO: 16162 - RNA, 21 nt, Artificial Sequence
  SAMD9L targeting guide sequence portion
gaaaguugggguuuugugacu

SEQ ID NO: 16163 - RNA, 21 nt, Artificial Sequence
  SAMD9L targeting guide sequence portion
gaaauaagcuauagcugcuaa

SEQ ID NO: 16164 - RNA, 21 nt, Artificial Sequence
  SAMD9L targeting guide sequence portion
gaaauugguuuccguagcaua

SEQ ID NO: 16165 - RNA, 21 nt, Artificial Sequence
  SAMD9L targeting guide sequence portion
gaacaggaauccacagcuggc

SEQ ID NO: 16166 - RNA, 21 nt, Artificial Sequence
  SAMD9L targeting guide sequence portion
gaagauacauauauauaugua

SEQ ID NO: 16167 - RNA, 21 nt, Artificial Sequence
  SAMD9L targeting guide sequence portion
gaaguggguugaggaacagga

SEQ ID NO: 16168 - RNA, 21 nt, Artificial Sequence
  SAMD9L targeting guide sequence portion
gaauauugcaaauaaacuuua

SEQ ID NO: 16169 - RNA, 21 nt, Artificial Sequence
  SAMD9L targeting guide sequence portion
gaauccacagcuggcuaucuu

SEQ ID NO: 16170 - RNA, 21 nt, Artificial Sequence
  SAMD9L targeting guide sequence portion
gaaucuuaaguaacauagaaa

SEQ ID NO: 16171 - RNA, 21 nt, Artificial Sequence
  SAMD9L targeting guide sequence portion
gaauuaggaugguaaaauagc

SEQ ID NO: 16172 - RNA, 21 nt, Artificial Sequence
  SAMD9L targeting guide sequence portion
gaauuauacuuuauuuuuaaa

SEQ ID NO: 16173 - RNA, 21 nt, Artificial Sequence
  SAMD9L targeting guide sequence portion
gaauuauuauaaggcuaaaag

SEQ ID NO: 16174 - RNA, 21 nt, Artificial Sequence
  SAMD9L targeting guide sequence portion
gacaaagcaauauaauaagua

SEQ ID NO: 16175 - RNA, 21 nt, Artificial Sequence
  SAMD9L targeting guide sequence portion
gacaauuauguauacauuauc

SEQ ID NO: 16176 - RNA, 21 nt, Artificial Sequence
  SAMD9L targeting guide sequence portion
gacacaccuuuuagccuuaua

SEQ ID NO: 16177 - RNA, 21 nt, Artificial Sequence
  SAMD9L targeting guide sequence portion
gacucuaauuguaauuaugaa

SEQ ID NO: 16178 - RNA, 21 nt, Artificial Sequence
  SAMD9L targeting guide sequence portion
gacucuuaaaacugcuugaua

SEQ ID NO: 16179 - RNA, 21 nt, Artificial Sequence
  SAMD9L targeting guide sequence portion
gacuuaaaagcagaaucuuaa

SEQ ID NO: 16180 - RNA, 21 nt, Artificial Sequence
  SAMD9L targeting guide sequence portion
gagaauuauuauaaggcuaaa

SEQ ID NO: 16181 - RNA, 21 nt, Artificial Sequence
  SAMD9L targeting guide sequence portion
gagacaaagcaauauaauaag

SEQ ID NO: 16182 - RNA, 21 nt, Artificial Sequence
  SAMD9L targeting guide sequence portion
gagcaguugguuaaauaaucu

SEQ ID NO: 16183 - RNA, 21 nt, Artificial Sequence
  SAMD9L targeting guide sequence portion
gaggaacaggaauccacagcu

SEQ ID NO: 16184 - RNA, 21 nt, Artificial Sequence
  SAMD9L targeting guide sequence portion
gagucaccuaagaaacaaggg

SEQ ID NO: 16185 - RNA, 21 nt, Artificial Sequence
  SAMD9L targeting guide sequence portion
gagucagccuuuagcaauauu

SEQ ID NO: 16186 - RNA, 21 nt, Artificial Sequence
  SAMD9L targeting guide sequence portion
gaguuccaaaagaaaacagau

SEQ ID NO: 16187 - RNA, 21 nt, Artificial Sequence
  SAMD9L targeting guide sequence portion
gauaauguauacauaauuguc

SEQ ID NO: 16188 - RNA, 21 nt, Artificial Sequence
  SAMD9L targeting guide sequence portion
gauacauauauauauguauaa

SEQ ID NO: 16189 - RNA, 21 nt, Artificial Sequence
  SAMD9L targeting guide sequence portion
gauacuuacuuuagcuauuuu

SEQ ID NO: 16190 - RNA, 21 nt, Artificial Sequence
  SAMD9L targeting guide sequence portion
gauagccagcuguggauuccu

SEQ ID NO: 16191 - RNA, 21 nt, Artificial Sequence
  SAMD9L targeting guide sequence portion
gauagguagaaguggguugag

SEQ ID NO: 16192 - RNA, 21 nt, Artificial Sequence
  SAMD9L targeting guide sequence portion
gaugguaaaauagcuaaagua

SEQ ID NO: 16193 - RNA, 21 nt, Artificial Sequence
  SAMD9L targeting guide sequence portion
gauuauuuaaccaacugcucu

SEQ ID NO: 16194 - RNA, 21 nt, Artificial Sequence
  SAMD9L targeting guide sequence portion
gauuccuguuccucaacccac

SEQ ID NO: 16195 - RNA, 21 nt, Artificial Sequence
  SAMD9L targeting guide sequence portion
gauucugcuuuuaagucacaa

SEQ ID NO: 16196 - RNA, 21 nt, Artificial Sequence
  SAMD9L targeting guide sequence portion
gauuuuaaaaauaaaguauaa

SEQ ID NO: 16197 - RNA, 21 nt, Artificial Sequence
  SAMD9L targeting guide sequence portion
gcaaauaaacuuuaaaauaau

SEQ ID NO: 16198 - RNA, 21 nt, Artificial Sequence
  SAMD9L targeting guide sequence portion
gcaauauaauaaguauuuuag

SEQ ID NO: 16199 - RNA, 21 nt, Artificial Sequence
  SAMD9L targeting guide sequence portion
gcaauauuauacauauauaua

SEQ ID NO: 16200 - RNA, 21 nt, Artificial Sequence
  SAMD9L targeting guide sequence portion
gcaauauuccuauaugcuacg

SEQ ID NO: 16201 - RNA, 21 nt, Artificial Sequence
  SAMD9L targeting guide sequence portion
gcagaaucuuaaguaacauag

SEQ ID NO: 16202 - RNA, 21 nt, Artificial Sequence
  SAMD9L targeting guide sequence portion
gcagcuauagcuuauuucaua

SEQ ID NO: 16203 - RNA, 21 nt, Artificial Sequence
  SAMD9L targeting guide sequence portion
gcaguugguuaaauaaucugu

SEQ ID NO: 16204 - RNA, 21 nt, Artificial Sequence
  SAMD9L targeting guide sequence portion
gcaguuuuaagagucagccuu

SEQ ID NO: 16205 - RNA, 21 nt, Artificial Sequence
  SAMD9L targeting guide sequence portion
gcauauaggaauauugcaaau

SEQ ID NO: 16206 - RNA, 21 nt, Artificial Sequence
  SAMD9L targeting guide sequence portion
gccagcuguggauuccuguuc

SEQ ID NO: 16207 - RNA, 21 nt, Artificial Sequence
  SAMD9L targeting guide sequence portion
gccuuauaauaauucucccuu

SEQ ID NO: 16208 - RNA, 21 nt, Artificial Sequence
  SAMD9L targeting guide sequence portion
gccuuuagcaauauuauacau

SEQ ID NO: 16209 - RNA, 21 nt, Artificial Sequence
  SAMD9L targeting guide sequence portion
gcuaaaagggagaauuauuau

SEQ ID NO: 16210 - RNA, 21 nt, Artificial Sequence
  SAMD9L targeting guide sequence portion
gcuaaaaggugugucaccagu

SEQ ID NO: 16211 - RNA, 21 nt, Artificial Sequence
  SAMD9L targeting guide sequence portion
gcuaaaggcugacucuuaaaa

SEQ ID NO: 16212 - RNA, 21 nt, Artificial Sequence
  SAMD9L targeting guide sequence portion
gcuaaaguaaguaucaagcag

SEQ ID NO: 16213 - RNA, 21 nt, Artificial Sequence
  SAMD9L targeting guide sequence portion
gcuaacuggugacacaccuuu

SEQ ID NO: 16214 - RNA, 21 nt, Artificial Sequence
  SAMD9L targeting guide sequence portion
gcuacggaaaccaauuucuau

SEQ ID NO: 16215 - RNA, 21 nt, Artificial Sequence
  SAMD9L targeting guide sequence portion
gcuauagcugcuaacugguga

SEQ ID NO: 16216 - RNA, 21 nt, Artificial Sequence
  SAMD9L targeting guide sequence portion
gcuauagcuuauuucauaauu

SEQ ID NO: 16217 - RNA, 21 nt, Artificial Sequence
  SAMD9L targeting guide sequence portion
gcuaucuuuguuacauaguaa

SEQ ID NO: 16218 - RNA, 21 nt, Artificial Sequence
  SAMD9L targeting guide sequence portion
gcuauuuuaccauccuaauuc

SEQ ID NO: 16219 - RNA, 21 nt, Artificial Sequence
  SAMD9L targeting guide sequence portion
gcucuguuacuauguaacaaa

SEQ ID NO: 16220 - RNA, 21 nt, Artificial Sequence
  SAMD9L targeting guide sequence portion
gcugacucuuaaaacugcuug

SEQ ID NO: 16221 - RNA, 21 nt, Artificial Sequence
  SAMD9L targeting guide sequence portion
gcugcuaacuggugacacacc

SEQ ID NO: 16222 - RNA, 21 nt, Artificial Sequence
  SAMD9L targeting guide sequence portion
gcuggcuaucuuuguuacaua

SEQ ID NO: 16223 - RNA, 21 nt, Artificial Sequence
  SAMD9L targeting guide sequence portion
gcuguggauuccuguuccuca

SEQ ID NO: 16224 - RNA, 21 nt, Artificial Sequence
  SAMD9L targeting guide sequence portion
gcuuaacuuggugaaaguugg

SEQ ID NO: 16225 - RNA, 21 nt, Artificial Sequence
  SAMD9L targeting guide sequence portion
gcuuauuucauaauuacaauu

SEQ ID NO: 16226 - RNA, 21 nt, Artificial Sequence
  SAMD9L targeting guide sequence portion
gcuugaguuccaaaagaaaac

SEQ ID NO: 16227 - RNA, 21 nt, Artificial Sequence
  SAMD9L targeting guide sequence portion
gcuugauacuuacuuuagcua

SEQ ID NO: 16228 - RNA, 21 nt, Artificial Sequence
  SAMD9L targeting guide sequence portion
gcuuuuaagucacaaaacccc

SEQ ID NO: 16229 - RNA, 21 nt, Artificial Sequence
  SAMD9L targeting guide sequence portion
ggaaaccaauuucuauguuac

SEQ ID NO: 16230 - RNA, 21 nt, Artificial Sequence
  SAMD9L targeting guide sequence portion
ggaacaggaauccacagcugg

SEQ ID NO: 16231 - RNA, 21 nt, Artificial Sequence
  SAMD9L targeting guide sequence portion
ggaauauugcaaauaaacuuu

SEQ ID NO: 16232 - RNA, 21 nt, Artificial Sequence
  SAMD9L targeting guide sequence portion
ggaauccacagcuggcuaucu

SEQ ID NO: 16233 - RNA, 21 nt, Artificial Sequence
  SAMD9L targeting guide sequence portion
ggagaauuauuauaaggcuaa

SEQ ID NO: 16234 - RNA, 21 nt, Artificial Sequence
  SAMD9L targeting guide sequence portion
ggauagguagaaguggguuga

SEQ ID NO: 16235 - RNA, 21 nt, Artificial Sequence
  SAMD9L targeting guide sequence portion
ggaugguaaaauagcuaaagu

SEQ ID NO: 16236 - RNA, 21 nt, Artificial Sequence
  SAMD9L targeting guide sequence portion
ggauuccuguuccucaaccca

SEQ ID NO: 16237 - RNA, 21 nt, Artificial Sequence
  SAMD9L targeting guide sequence portion
ggcuaaaaggugugucaccag

SEQ ID NO: 16238 - RNA, 21 nt, Artificial Sequence
  SAMD9L targeting guide sequence portion
ggcuaucuuuguuacauagua

SEQ ID NO: 16239 - RNA, 21 nt, Artificial Sequence
  SAMD9L targeting guide sequence portion
ggcugacucuuaaaacugcuu

SEQ ID NO: 16240 - RNA, 21 nt, Artificial Sequence
  SAMD9L targeting guide sequence portion
gggagaauuauuauaaggcua

SEQ ID NO: 16241 - RNA, 21 nt, Artificial Sequence
  SAMD9L targeting guide sequence portion
gggguuuugugacuuaaaagc

SEQ ID NO: 16242 - RNA, 21 nt, Artificial Sequence
  SAMD9L targeting guide sequence portion
ggguaugaauuaggaugguaa

SEQ ID NO: 16243 - RNA, 21 nt, Artificial Sequence
  SAMD9L targeting guide sequence portion
ggguugaggaacaggaaucca

SEQ ID NO: 16244 - RNA, 21 nt, Artificial Sequence
  SAMD9L targeting guide sequence portion
ggguuuugugacuuaaaagca

SEQ ID NO: 16245 - RNA, 21 nt, Artificial Sequence
  SAMD9L targeting guide sequence portion
gguaaaauagcuaaaguaagu

SEQ ID NO: 16246 - RNA, 21 nt, Artificial Sequence
  SAMD9L targeting guide sequence portion
gguagaaguggguugaggaac

SEQ ID NO: 16247 - RNA, 21 nt, Artificial Sequence
  SAMD9L targeting guide sequence portion
gguaugaauuaggaugguaaa

SEQ ID NO: 16248 - RNA, 21 nt, Artificial Sequence
  SAMD9L targeting guide sequence portion
ggugaaaguugggguuuugug

SEQ ID NO: 16249 - RNA, 21 nt, Artificial Sequence
  SAMD9L targeting guide sequence portion
ggugacacaccuuuuagccuu

SEQ ID NO: 16250 - RNA, 21 nt, Artificial Sequence
  SAMD9L targeting guide sequence portion
ggugacucuaauuguaauuau

SEQ ID NO: 16251 - RNA, 21 nt, Artificial Sequence
  SAMD9L targeting guide sequence portion
ggugugucaccaguuagcagc

SEQ ID NO: 16252 - RNA, 21 nt, Artificial Sequence
  SAMD9L targeting guide sequence portion
gguuaaauaaucuguuuucuu

SEQ ID NO: 16253 - RNA, 21 nt, Artificial Sequence
  SAMD9L targeting guide sequence portion
gguugaggaacaggaauccac

SEQ ID NO: 16254 - RNA, 21 nt, Artificial Sequence
  SAMD9L targeting guide sequence portion
gguuuccguagcauauaggaa

SEQ ID NO: 16255 - RNA, 21 nt, Artificial Sequence
  SAMD9L targeting guide sequence portion
gguuuugugacuuaaaagcag

SEQ ID NO: 16256 - RNA, 21 nt, Artificial Sequence
  SAMD9L targeting guide sequence portion
guaaaauagcuaaaguaagua

SEQ ID NO: 16257 - RNA, 21 nt, Artificial Sequence
  SAMD9L targeting guide sequence portion
guaacaaagauagccagcugu

SEQ ID NO: 16258 - RNA, 21 nt, Artificial Sequence
  SAMD9L targeting guide sequence portion
guaacagagcaguugguuaaa

SEQ ID NO: 16259 - RNA, 21 nt, Artificial Sequence
  SAMD9L targeting guide sequence portion
guaacauagaaauugguuucc

SEQ ID NO: 16260 - RNA, 21 nt, Artificial Sequence
  SAMD9L targeting guide sequence portion
guaaguaucaagcaguuuuaa

SEQ ID NO: 16261 - RNA, 21 nt, Artificial Sequence
  SAMD9L targeting guide sequence portion
guaauuaugaaauaagcuaua

SEQ ID NO: 16262 - RNA, 21 nt, Artificial Sequence
  SAMD9L targeting guide sequence portion
guagaaguggguugaggaaca

SEQ ID NO: 16263 - RNA, 21 nt, Artificial Sequence
  SAMD9L targeting guide sequence portion
guagcauauaggaauauugca

SEQ ID NO: 16264 - RNA, 21 nt, Artificial Sequence
  SAMD9L targeting guide sequence portion
guauaauauugcuaaaggcug

SEQ ID NO: 16265 - RNA, 21 nt, Artificial Sequence
  SAMD9L targeting guide sequence portion
guauaauucuaaaauacuuau

SEQ ID NO: 16266 - RNA, 21 nt, Artificial Sequence
  SAMD9L targeting guide sequence portion
guauacauaauugucuaugug

SEQ ID NO: 16267 - RNA, 21 nt, Artificial Sequence
  SAMD9L targeting guide sequence portion
guauacauuaucauacagaag

SEQ ID NO: 16268 - RNA, 21 nt, Artificial Sequence
  SAMD9L targeting guide sequence portion
guaucaagcaguuuuaagagu

SEQ ID NO: 16269 - RNA, 21 nt, Artificial Sequence
  SAMD9L targeting guide sequence portion
guaucuucuguaugauaaugu

SEQ ID NO: 16270 - RNA, 21 nt, Artificial Sequence
  SAMD9L targeting guide sequence portion
guaugaauuaggaugguaaaa

SEQ ID NO: 16271 - RNA, 21 nt, Artificial Sequence
  SAMD9L targeting guide sequence portion
guaugauaauguauacauaau

SEQ ID NO: 16272 - RNA, 21 nt, Artificial Sequence
  SAMD9L targeting guide sequence portion
guauuuuagaauuauacuuua

SEQ ID NO: 16273 - RNA, 21 nt, Artificial Sequence
  SAMD9L targeting guide sequence portion
gucacaaaaccccaacuuuca

SEQ ID NO: 16274 - RNA, 21 nt, Artificial Sequence
  SAMD9L targeting guide sequence portion
gucaccaguuagcagcuauag

SEQ ID NO: 16275 - RNA, 21 nt, Artificial Sequence
  SAMD9L targeting guide sequence portion
gucaccuaagaaacaagggua

SEQ ID NO: 16276 - RNA, 21 nt, Artificial Sequence
  SAMD9L targeting guide sequence portion
gucagccuuuagcaauauuau

SEQ ID NO: 16277 - RNA, 21 nt, Artificial Sequence
  SAMD9L targeting guide sequence portion
gucuaugugauuuuaaaaaua

SEQ ID NO: 16278 - RNA, 21 nt, Artificial Sequence
  SAMD9L targeting guide sequence portion
gugaaaguugggguuuuguga

SEQ ID NO: 16279 - RNA, 21 nt, Artificial Sequence
  SAMD9L targeting guide sequence portion
gugacacaccuuuuagccuua

SEQ ID NO: 16280 - RNA, 21 nt, Artificial Sequence
  SAMD9L targeting guide sequence portion
gugacucuaauuguaauuaug

SEQ ID NO: 16281 - RNA, 21 nt, Artificial Sequence
  SAMD9L targeting guide sequence portion
gugacuuaaaagcagaaucuu

SEQ ID NO: 16282 - RNA, 21 nt, Artificial Sequence
  SAMD9L targeting guide sequence portion
gugauuuuaaaaauaaaguau

SEQ ID NO: 16283 - RNA, 21 nt, Artificial Sequence
  SAMD9L targeting guide sequence portion
guggauuccuguuccucaacc

SEQ ID NO: 16284 - RNA, 21 nt, Artificial Sequence
  SAMD9L targeting guide sequence portion
guggguugaggaacaggaauc

SEQ ID NO: 16285 - RNA, 21 nt, Artificial Sequence
  SAMD9L targeting guide sequence portion
gugucaccaguuagcagcuau

SEQ ID NO: 16286 - RNA, 21 nt, Artificial Sequence
  SAMD9L targeting guide sequence portion
gugugucaccaguuagcagcu

SEQ ID NO: 16287 - RNA, 21 nt, Artificial Sequence
  SAMD9L targeting guide sequence portion
guuaaauaaucuguuuucuuu

SEQ ID NO: 16288 - RNA, 21 nt, Artificial Sequence
  SAMD9L targeting guide sequence portion
guuaagcuaaaagggagaauu

SEQ ID NO: 16289 - RNA, 21 nt, Artificial Sequence
  SAMD9L targeting guide sequence portion
guuacauaguaacagagcagu

SEQ ID NO: 16290 - RNA, 21 nt, Artificial Sequence
  SAMD9L targeting guide sequence portion
guuacuauguaacaaagauag

SEQ ID NO: 16291 - RNA, 21 nt, Artificial Sequence
  SAMD9L targeting guide sequence portion
guuacuuaagauucugcuuuu

SEQ ID NO: 16292 - RNA, 21 nt, Artificial Sequence
  SAMD9L targeting guide sequence portion
guuagcagcuauagcuuauuu

SEQ ID NO: 16293 - RNA, 21 nt, Artificial Sequence
  SAMD9L targeting guide sequence portion
guuccaaaagaaaacagauua

SEQ ID NO: 16294 - RNA, 21 nt, Artificial Sequence
  SAMD9L targeting guide sequence portion
guuccucaacccacuucuacc

SEQ ID NO: 16295 - RNA, 21 nt, Artificial Sequence
  SAMD9L targeting guide sequence portion
guugaggaacaggaauccaca

SEQ ID NO: 16296 - RNA, 21 nt, Artificial Sequence
  SAMD9L targeting guide sequence portion
guugggguuuugugacuuaaa

SEQ ID NO: 16297 - RNA, 21 nt, Artificial Sequence
  SAMD9L targeting guide sequence portion
guugguuaaauaaucuguuuu

SEQ ID NO: 16298 - RNA, 21 nt, Artificial Sequence
  SAMD9L targeting guide sequence portion
guuuauuugcaauauuccuau

SEQ ID NO: 16299 - RNA, 21 nt, Artificial Sequence
  SAMD9L targeting guide sequence portion
guuucauuauuuuaaaguuua

SEQ ID NO: 16300 - RNA, 21 nt, Artificial Sequence
  SAMD9L targeting guide sequence portion
guuuccguagcauauaggaau

SEQ ID NO: 16301 - RNA, 21 nt, Artificial Sequence
  SAMD9L targeting guide sequence portion
guuucuuaggugacucuaauu

SEQ ID NO: 16302 - RNA, 21 nt, Artificial Sequence
  SAMD9L targeting guide sequence portion
guuuuaagagucagccuuuag

SEQ ID NO: 16303 - RNA, 21 nt, Artificial Sequence
  SAMD9L targeting guide sequence portion
guuuugugacuuaaaagcaga

SEQ ID NO: 16304 - RNA, 21 nt, Artificial Sequence
  SAMD9L targeting guide sequence portion
uaaaaauaaaguauaauucua

SEQ ID NO: 16305 - RNA, 21 nt, Artificial Sequence
  SAMD9L targeting guide sequence portion
uaaaacugcuugauacuuacu

SEQ ID NO: 16306 - RNA, 21 nt, Artificial Sequence
  SAMD9L targeting guide sequence portion
uaaaagcagaaucuuaaguaa

SEQ ID NO: 16307 - RNA, 21 nt, Artificial Sequence
  SAMD9L targeting guide sequence portion
uaaaaggugugucaccaguua

SEQ ID NO: 16308 - RNA, 21 nt, Artificial Sequence
  SAMD9L targeting guide sequence portion
uaaaauaaugaaacuggauag

SEQ ID NO: 16309 - RNA, 21 nt, Artificial Sequence
  SAMD9L targeting guide sequence portion
uaaaauacuuauuauauugcu

SEQ ID NO: 16310 - RNA, 21 nt, Artificial Sequence
  SAMD9L targeting guide sequence portion
uaaaauagcuaaaguaaguau

SEQ ID NO: 16311 - RNA, 21 nt, Artificial Sequence
  SAMD9L targeting guide sequence portion
uaaaaucacauagacaauuau

SEQ ID NO: 16312 - RNA, 21 nt, Artificial Sequence
  SAMD9L targeting guide sequence portion
uaaacuuuaaaauaaugaaac

SEQ ID NO: 16313 - RNA, 21 nt, Artificial Sequence
  SAMD9L targeting guide sequence portion
uaaaggcugacucuuaaaacu

SEQ ID NO: 16314 - RNA, 21 nt, Artificial Sequence
  SAMD9L targeting guide sequence portion
uaaaguaaguaucaagcaguu

SEQ ID NO: 16315 - RNA, 21 nt, Artificial Sequence
  SAMD9L targeting guide sequence portion
uaaaguauaauucuaaaauac

SEQ ID NO: 16316 - RNA, 21 nt, Artificial Sequence
  SAMD9L targeting guide sequence portion
uaaaguuuauuugcaauauuc

SEQ ID NO: 16317 - RNA, 21 nt, Artificial Sequence
  SAMD9L targeting guide sequence portion
uaaauaaucuguuuucuuuug

SEQ ID NO: 16318 - RNA, 21 nt, Artificial Sequence
  SAMD9L targeting guide sequence portion
uaacaaagauagccagcugug

SEQ ID NO: 16319 - RNA, 21 nt, Artificial Sequence
  SAMD9L targeting guide sequence portion
uaacagagcaguugguuaaau

SEQ ID NO: 16320 - RNA, 21 nt, Artificial Sequence
  SAMD9L targeting guide sequence portion
uaacauagaaauugguuuccg

SEQ ID NO: 16321 - RNA, 21 nt, Artificial Sequence
  SAMD9L targeting guide sequence portion
uaaccaacugcucuguuacua

SEQ ID NO: 16322 - RNA, 21 nt, Artificial Sequence
  SAMD9L targeting guide sequence portion
uaacuggugacacaccuuuua

SEQ ID NO: 16323 - RNA, 21 nt, Artificial Sequence
  SAMD9L targeting guide sequence portion
uaacuuggugaaaguuggggu

SEQ ID NO: 16324 - RNA, 21 nt, Artificial Sequence
  SAMD9L targeting guide sequence portion
uaagaaacaaggguaugaauu

SEQ ID NO: 16325 - RNA, 21 nt, Artificial Sequence
  SAMD9L targeting guide sequence portion
uaagagucagccuuuagcaau

SEQ ID NO: 16326 - RNA, 21 nt, Artificial Sequence
  SAMD9L targeting guide sequence portion
uaagauucugcuuuuaaguca

SEQ ID NO: 16327 - RNA, 21 nt, Artificial Sequence
  SAMD9L targeting guide sequence portion
uaagcuaaaagggagaauuau

SEQ ID NO: 16328 - RNA, 21 nt, Artificial Sequence
  SAMD9L targeting guide sequence portion
uaagcuauagcugcuaacugg

SEQ ID NO: 16329 - RNA, 21 nt, Artificial Sequence
  SAMD9L targeting guide sequence portion
uaaggcuaaaaggugugucac

SEQ ID NO: 16330 - RNA, 21 nt, Artificial Sequence
  SAMD9L targeting guide sequence portion
uaaguaacauagaaauugguu

SEQ ID NO: 16331 - RNA, 21 nt, Artificial Sequence
  SAMD9L targeting guide sequence portion
uaaguaucaagcaguuuuaag

SEQ ID NO: 16332 - RNA, 21 nt, Artificial Sequence
  SAMD9L targeting guide sequence portion
uaaguauuuuagaauuauacu

SEQ ID NO: 16333 - RNA, 21 nt, Artificial Sequence
  SAMD9L targeting guide sequence portion
uaagucacaaaaccccaacuu

SEQ ID NO: 16334 - RNA, 21 nt, Artificial Sequence
  SAMD9L targeting guide sequence portion
uaauaaguauuuuagaauuau

SEQ ID NO: 16335 - RNA, 21 nt, Artificial Sequence
  SAMD9L targeting guide sequence portion
uaauaauucucccuuuuagcu

SEQ ID NO: 16336 - RNA, 21 nt, Artificial Sequence
  SAMD9L targeting guide sequence portion
uaauauugcuaaaggcugacu

SEQ ID NO: 16337 - RNA, 21 nt, Artificial Sequence
  SAMD9L targeting guide sequence portion
uaaucuguuuucuuuuggaac

SEQ ID NO: 16338 - RNA, 21 nt, Artificial Sequence
  SAMD9L targeting guide sequence portion
uaaugaaacuggauagguaga

SEQ ID NO: 16339 - RNA, 21 nt, Artificial Sequence
  SAMD9L targeting guide sequence portion
uaauguauacauaauugucua

SEQ ID NO: 16340 - RNA, 21 nt, Artificial Sequence
  SAMD9L targeting guide sequence portion
uaauuacaauuagagucaccu

SEQ ID NO: 16341 - RNA, 21 nt, Artificial Sequence
  SAMD9L targeting guide sequence portion
uaauuaugaaauaagcuauag

SEQ ID NO: 16342 - RNA, 21 nt, Artificial Sequence
  SAMD9L targeting guide sequence portion
uaauucauacccuuguuucuu

SEQ ID NO: 16343 - RNA, 21 nt, Artificial Sequence
  SAMD9L targeting guide sequence portion
uaauucuaaaauacuuauuau

SEQ ID NO: 16344 - RNA, 21 nt, Artificial Sequence
  SAMD9L targeting guide sequence portion
uaauucucccuuuuagcuuaa

SEQ ID NO: 16345 - RNA, 21 nt, Artificial Sequence
  SAMD9L targeting guide sequence portion
uaauuguaauuaugaaauaag

SEQ ID NO: 16346 - RNA, 21 nt, Artificial Sequence
  SAMD9L targeting guide sequence portion
uaauugucuaugugauuuuaa

SEQ ID NO: 16347 - RNA, 21 nt, Artificial Sequence
  SAMD9L targeting guide sequence portion
uacaauuagagucaccuaaga

SEQ ID NO: 16348 - RNA, 21 nt, Artificial Sequence
  SAMD9L targeting guide sequence portion
uacagaagauacauauauaua

SEQ ID NO: 16349 - RNA, 21 nt, Artificial Sequence
  SAMD9L targeting guide sequence portion
uacauaauugucuaugugauu

SEQ ID NO: 16350 - RNA, 21 nt, Artificial Sequence
  SAMD9L targeting guide sequence portion
uacauaguaacagagcaguug

SEQ ID NO: 16351 - RNA, 21 nt, Artificial Sequence
  SAMD9L targeting guide sequence portion
uacauauauauauguauaaua

SEQ ID NO: 16352 - RNA, 21 nt, Artificial Sequence
  SAMD9L targeting guide sequence portion
uacauauauauauguaucuuc

SEQ ID NO: 16353 - RNA, 21 nt, Artificial Sequence
  SAMD9L targeting guide sequence portion
uacauuaucauacagaagaua

SEQ ID NO: 16354 - RNA, 21 nt, Artificial Sequence
  SAMD9L targeting guide sequence portion
uaccauccuaauucauacccu

SEQ ID NO: 16355 - RNA, 21 nt, Artificial Sequence
  SAMD9L targeting guide sequence portion
uacccuuguuucuuaggugac

SEQ ID NO: 16356 - RNA, 21 nt, Artificial Sequence
  SAMD9L targeting guide sequence portion
uaccuauccaguuucauuauu

SEQ ID NO: 16357 - RNA, 21 nt, Artificial Sequence
  SAMD9L targeting guide sequence portion
uacggaaaccaauuucuaugu

SEQ ID NO: 16358 - RNA, 21 nt, Artificial Sequence
  SAMD9L targeting guide sequence portion
uacuauguaacaaagauagcc

SEQ ID NO: 16359 - RNA, 21 nt, Artificial Sequence
  SAMD9L targeting guide sequence portion
uacuuaagauucugcuuuuaa

SEQ ID NO: 16360 - RNA, 21 nt, Artificial Sequence
  SAMD9L targeting guide sequence portion
uacuuacuuuagcuauuuuac

SEQ ID NO: 16361 - RNA, 21 nt, Artificial Sequence
  SAMD9L targeting guide sequence portion
uacuuuagcuauuuuaccauc

SEQ ID NO: 16362 - RNA, 21 nt, Artificial Sequence
  SAMD9L targeting guide sequence portion
uacuuuauuuuuaaaaucaca

SEQ ID NO: 16363 - RNA, 21 nt, Artificial Sequence
  SAMD9L targeting guide sequence portion
uagaaauugguuuccguagca

SEQ ID NO: 16364 - RNA, 21 nt, Artificial Sequence
  SAMD9L targeting guide sequence portion
uagaaguggguugaggaacag

SEQ ID NO: 16365 - RNA, 21 nt, Artificial Sequence
  SAMD9L targeting guide sequence portion
uagaauuauacuuuauuuuua

SEQ ID NO: 16366 - RNA, 21 nt, Artificial Sequence
  SAMD9L targeting guide sequence portion
uagacaauuauguauacauua

SEQ ID NO: 16367 - RNA, 21 nt, Artificial Sequence
  SAMD9L targeting guide sequence portion
uagagucaccuaagaaacaag

SEQ ID NO: 16368 - RNA, 21 nt, Artificial Sequence
  SAMD9L targeting guide sequence portion
uagcaauauuauacauauaua

SEQ ID NO: 16369 - RNA, 21 nt, Artificial Sequence
  SAMD9L targeting guide sequence portion
uagcagcuauagcuuauuuca

SEQ ID NO: 16370 - RNA, 21 nt, Artificial Sequence
  SAMD9L targeting guide sequence portion
uagcauauaggaauauugcaa

SEQ ID NO: 16371 - RNA, 21 nt, Artificial Sequence
  SAMD9L targeting guide sequence portion
uagccagcuguggauuccugu

SEQ ID NO: 16372 - RNA, 21 nt, Artificial Sequence
  SAMD9L targeting guide sequence portion
uagccuuauaauaauucuccc

SEQ ID NO: 16373 - RNA, 21 nt, Artificial Sequence
  SAMD9L targeting guide sequence portion
uagcuaaaguaaguaucaagc

SEQ ID NO: 16374 - RNA, 21 nt, Artificial Sequence
  SAMD9L targeting guide sequence portion
uagcuauuuuaccauccuaau

SEQ ID NO: 16375 - RNA, 21 nt, Artificial Sequence
  SAMD9L targeting guide sequence portion
uagcugcuaacuggugacaca

SEQ ID NO: 16376 - RNA, 21 nt, Artificial Sequence
  SAMD9L targeting guide sequence portion
uagcuuaacuuggugaaaguu

SEQ ID NO: 16377 - RNA, 21 nt, Artificial Sequence
  SAMD9L targeting guide sequence portion
uagcuuauuucauaauuacaa

SEQ ID NO: 16378 - RNA, 21 nt, Artificial Sequence
  SAMD9L targeting guide sequence portion
uaggaauauugcaaauaaacu

SEQ ID NO: 16379 - RNA, 21 nt, Artificial Sequence
  SAMD9L targeting guide sequence portion
uaggaugguaaaauagcuaaa

SEQ ID NO: 16380 - RNA, 21 nt, Artificial Sequence
  SAMD9L targeting guide sequence portion
uagguagaaguggguugagga

SEQ ID NO: 16381 - RNA, 21 nt, Artificial Sequence
  SAMD9L targeting guide sequence portion
uaggugacucuaauuguaauu

SEQ ID NO: 16382 - RNA, 21 nt, Artificial Sequence
  SAMD9L targeting guide sequence portion
uaguaacagagcaguugguua

SEQ ID NO: 16383 - RNA, 21 nt, Artificial Sequence
  SAMD9L targeting guide sequence portion
uauaaggcuaaaagguguguc

SEQ ID NO: 16384 - RNA, 21 nt, Artificial Sequence
  SAMD9L targeting guide sequence portion
uauaauaaguauuuuagaauu

SEQ ID NO: 16385 - RNA, 21 nt, Artificial Sequence
  SAMD9L targeting guide sequence portion
uauaauaauucucccuuuuag

SEQ ID NO: 16386 - RNA, 21 nt, Artificial Sequence
  SAMD9L targeting guide sequence portion
uauaauauugcuaaaggcuga

SEQ ID NO: 16387 - RNA, 21 nt, Artificial Sequence
  SAMD9L targeting guide sequence portion
uauaauucuaaaauacuuauu

SEQ ID NO: 16388 - RNA, 21 nt, Artificial Sequence
  SAMD9L targeting guide sequence portion
uauacauaauugucuauguga

SEQ ID NO: 16389 - RNA, 21 nt, Artificial Sequence
  SAMD9L targeting guide sequence portion
uauacauauauauauguaucu

SEQ ID NO: 16390 - RNA, 21 nt, Artificial Sequence
  SAMD9L targeting guide sequence portion
uauacauuaucauacagaaga

SEQ ID NO: 16391 - RNA, 21 nt, Artificial Sequence
  SAMD9L targeting guide sequence portion
uauacuuuauuuuuaaaauca

SEQ ID NO: 16392 - RNA, 21 nt, Artificial Sequence
  SAMD9L targeting guide sequence portion
uauagcugcuaacuggugaca

SEQ ID NO: 16393 - RNA, 21 nt, Artificial Sequence
  SAMD9L targeting guide sequence portion
uauagcuuauuucauaauuac

SEQ ID NO: 16394 - RNA, 21 nt, Artificial Sequence
  SAMD9L targeting guide sequence portion
uauaggaauauugcaaauaaa

SEQ ID NO: 16395 - RNA, 21 nt, Artificial Sequence
  SAMD9L targeting guide sequence portion
uauauauauguauaauauugc

SEQ ID NO: 16396 - RNA, 21 nt, Artificial Sequence
  SAMD9L targeting guide sequence portion
uauauauauguaucuucugua

SEQ ID NO: 16397 - RNA, 21 nt, Artificial Sequence
  SAMD9L targeting guide sequence portion
uauauauguauaauauugcua

SEQ ID NO: 16398 - RNA, 21 nt, Artificial Sequence
  SAMD9L targeting guide sequence portion
uauauauguaucuucuguaug

SEQ ID NO: 16399 - RNA, 21 nt, Artificial Sequence
  SAMD9L targeting guide sequence portion
uauaugcuacggaaaccaauu

SEQ ID NO: 16400 - RNA, 21 nt, Artificial Sequence
  SAMD9L targeting guide sequence portion
uauauguauaauauugcuaaa

SEQ ID NO: 16401 - RNA, 21 nt, Artificial Sequence
  SAMD9L targeting guide sequence portion
uauauguaucuucuguaugau

SEQ ID NO: 16402 - RNA, 21 nt, Artificial Sequence
  SAMD9L targeting guide sequence portion
uaucaagcaguuuuaagaguc

SEQ ID NO: 16403 - RNA, 21 nt, Artificial Sequence
  SAMD9L targeting guide sequence portion
uaucauacagaagauacauau

SEQ ID NO: 16404 - RNA, 21 nt, Artificial Sequence
  SAMD9L targeting guide sequence portion
uauccaguuucauuauuuuaa

SEQ ID NO: 16405 - RNA, 21 nt, Artificial Sequence
  SAMD9L targeting guide sequence portion
uaucuucuguaugauaaugua

SEQ ID NO: 16406 - RNA, 21 nt, Artificial Sequence
  SAMD9L targeting guide sequence portion
uaucuuuguuacauaguaaca

SEQ ID NO: 16407 - RNA, 21 nt, Artificial Sequence
  SAMD9L targeting guide sequence portion
uaugaaauaagcuauagcugc

SEQ ID NO: 16408 - RNA, 21 nt, Artificial Sequence
  SAMD9L targeting guide sequence portion
uaugaauuaggaugguaaaau

SEQ ID NO: 16409 - RNA, 21 nt, Artificial Sequence
  SAMD9L targeting guide sequence portion
uaugauaauguauacauaauu

SEQ ID NO: 16410 - RNA, 21 nt, Artificial Sequence
  SAMD9L targeting guide sequence portion
uaugcuacggaaaccaauuuc

SEQ ID NO: 16411 - RNA, 21 nt, Artificial Sequence
  SAMD9L targeting guide sequence portion
uauguaacaaagauagccagc

SEQ ID NO: 16412 - RNA, 21 nt, Artificial Sequence
  SAMD9L targeting guide sequence portion
uauguauaauauugcuaaagg

SEQ ID NO: 16413 - RNA, 21 nt, Artificial Sequence
  SAMD9L targeting guide sequence portion
uauguauacauuaucauacag

SEQ ID NO: 16414 - RNA, 21 nt, Artificial Sequence
  SAMD9L targeting guide sequence portion
uauguaucuucuguaugauaa

SEQ ID NO: 16415 - RNA, 21 nt, Artificial Sequence
  SAMD9L targeting guide sequence portion
uaugugauuuuaaaaauaaag

SEQ ID NO: 16416 - RNA, 21 nt, Artificial Sequence
  SAMD9L targeting guide sequence portion
uauguuacuuaagauucugcu

SEQ ID NO: 16417 - RNA, 21 nt, Artificial Sequence
  SAMD9L targeting guide sequence portion
uauuauaaggcuaaaaggugu

SEQ ID NO: 16418 - RNA, 21 nt, Artificial Sequence
  SAMD9L targeting guide sequence portion
uauuauacauauauauaugua

SEQ ID NO: 16419 - RNA, 21 nt, Artificial Sequence
  SAMD9L targeting guide sequence portion
uauuccuauaugcuacggaaa

SEQ ID NO: 16420 - RNA, 21 nt, Artificial Sequence
  SAMD9L targeting guide sequence portion
uauugcaaauaaacuuuaaaa

SEQ ID NO: 16421 - RNA, 21 nt, Artificial Sequence
  SAMD9L targeting guide sequence portion
uauugcuaaaggcugacucuu

SEQ ID NO: 16422 - RNA, 21 nt, Artificial Sequence
  SAMD9L targeting guide sequence portion
uauuuaaccaacugcucuguu

SEQ ID NO: 16423 - RNA, 21 nt, Artificial Sequence
  SAMD9L targeting guide sequence portion
uauuucauaauuacaauuaga

SEQ ID NO: 16424 - RNA, 21 nt, Artificial Sequence
  SAMD9L targeting guide sequence portion
uauuugcaauauuccuauaug

SEQ ID NO: 16425 - RNA, 21 nt, Artificial Sequence
  SAMD9L targeting guide sequence portion
uauuuuaaaguuuauuugcaa

SEQ ID NO: 16426 - RNA, 21 nt, Artificial Sequence
  SAMD9L targeting guide sequence portion
uauuuuaccauccuaauucau

SEQ ID NO: 16427 - RNA, 21 nt, Artificial Sequence
  SAMD9L targeting guide sequence portion
uauuuuagaauuauacuuuau

SEQ ID NO: 16428 - RNA, 21 nt, Artificial Sequence
  SAMD9L targeting guide sequence portion
uauuuuuaaaaucacauagac

SEQ ID NO: 16429 - RNA, 21 nt, Artificial Sequence
  SAMD9L targeting guide sequence portion
ucaacccacuucuaccuaucc

SEQ ID NO: 16430 - RNA, 21 nt, Artificial Sequence
  SAMD9L targeting guide sequence portion
ucaagcaguuuuaagagucag

SEQ ID NO: 16431 - RNA, 21 nt, Artificial Sequence
  SAMD9L targeting guide sequence portion
ucacaaaaccccaacuuucac

SEQ ID NO: 16432 - RNA, 21 nt, Artificial Sequence
  SAMD9L targeting guide sequence portion
ucacauagacaauuauguaua

SEQ ID NO: 16433 - RNA, 21 nt, Artificial Sequence
  SAMD9L targeting guide sequence portion
ucaccaaguuaagcuaaaagg

SEQ ID NO: 16434 - RNA, 21 nt, Artificial Sequence
  SAMD9L targeting guide sequence portion
ucaccaguuagcagcuauagc

SEQ ID NO: 16435 - RNA, 21 nt, Artificial Sequence
  SAMD9L targeting guide sequence portion
ucaccuaagaaacaaggguau

SEQ ID NO: 16436 - RNA, 21 nt, Artificial Sequence
  SAMD9L targeting guide sequence portion
ucagccuuuagcaauauuaua

SEQ ID NO: 16437 - RNA, 21 nt, Artificial Sequence
  SAMD9L targeting guide sequence portion
ucauaauuacaauuagaguca

SEQ ID NO: 16438 - RNA, 21 nt, Artificial Sequence
  SAMD9L targeting guide sequence portion
ucauacagaagauacauauau

SEQ ID NO: 16439 - RNA, 21 nt, Artificial Sequence
  SAMD9L targeting guide sequence portion
ucauacccuuguuucuuaggu

SEQ ID NO: 16440 - RNA, 21 nt, Artificial Sequence
  SAMD9L targeting guide sequence portion
ucauuauuuuaaaguuuauuu

SEQ ID NO: 16441 - RNA, 21 nt, Artificial Sequence
  SAMD9L targeting guide sequence portion
uccaaaagaaaacagauuauu

SEQ ID NO: 16442 - RNA, 21 nt, Artificial Sequence
  SAMD9L targeting guide sequence portion
uccacagcuggcuaucuuugu

SEQ ID NO: 16443 - RNA, 21 nt, Artificial Sequence
  SAMD9L targeting guide sequence portion
uccaguuucauuauuuuaaag

SEQ ID NO: 16444 - RNA, 21 nt, Artificial Sequence
  SAMD9L targeting guide sequence portion
ucccuuuuagcuuaacuuggu

SEQ ID NO: 16445 - RNA, 21 nt, Artificial Sequence
  SAMD9L targeting guide sequence portion
uccguagcauauaggaauauu

SEQ ID NO: 16446 - RNA, 21 nt, Artificial Sequence
  SAMD9L targeting guide sequence portion
uccuaauucauacccuuguuu

SEQ ID NO: 16447 - RNA, 21 nt, Artificial Sequence
  SAMD9L targeting guide sequence portion
uccuauaugcuacggaaacca

SEQ ID NO: 16448 - RNA, 21 nt, Artificial Sequence
  SAMD9L targeting guide sequence portion
uccucaacccacuucuaccua

SEQ ID NO: 16449 - RNA, 21 nt, Artificial Sequence
  SAMD9L targeting guide sequence portion
uccuguuccucaacccacuuc

SEQ ID NO: 16450 - RNA, 21 nt, Artificial Sequence
  SAMD9L targeting guide sequence portion
ucuaaaauacuuauuauauug

SEQ ID NO: 16451 - RNA, 21 nt, Artificial Sequence
  SAMD9L targeting guide sequence portion
ucuaauuguaauuaugaaaua

SEQ ID NO: 16452 - RNA, 21 nt, Artificial Sequence
  SAMD9L targeting guide sequence portion
ucuaccuauccaguuucauua

SEQ ID NO: 16453 - RNA, 21 nt, Artificial Sequence
  SAMD9L targeting guide sequence portion
ucuaugugauuuuaaaaauaa

SEQ ID NO: 16454 - RNA, 21 nt, Artificial Sequence
  SAMD9L targeting guide sequence portion
ucuauguuacuuaagauucug

SEQ ID NO: 16455 - RNA, 21 nt, Artificial Sequence
  SAMD9L targeting guide sequence portion
ucucccuuuuagcuuaacuug

SEQ ID NO: 16456 - RNA, 21 nt, Artificial Sequence
  SAMD9L targeting guide sequence portion
ucugcuuuuaagucacaaaac

SEQ ID NO: 16457 - RNA, 21 nt, Artificial Sequence
  SAMD9L targeting guide sequence portion
ucuguaugauaauguauacau

SEQ ID NO: 16458 - RNA, 21 nt, Artificial Sequence
  SAMD9L targeting guide sequence portion
ucuguuacuauguaacaaaga

SEQ ID NO: 16459 - RNA, 21 nt, Artificial Sequence
  SAMD9L targeting guide sequence portion
ucuguuuucuuuuggaacuca

SEQ ID NO: 16460 - RNA, 21 nt, Artificial Sequence
  SAMD9L targeting guide sequence portion
ucuuaaaacugcuugauacuu

SEQ ID NO: 16461 - RNA, 21 nt, Artificial Sequence
  SAMD9L targeting guide sequence portion
ucuuaaguaacauagaaauug

SEQ ID NO: 16462 - RNA, 21 nt, Artificial Sequence
  SAMD9L targeting guide sequence portion
ucuuaggugacucuaauugua

SEQ ID NO: 16463 - RNA, 21 nt, Artificial Sequence
  SAMD9L targeting guide sequence portion
ucuucuguaugauaauguaua

SEQ ID NO: 16464 - RNA, 21 nt, Artificial Sequence
  SAMD9L targeting guide sequence portion
ucuuuguuacauaguaacaga

SEQ ID NO: 16465 - RNA, 21 nt, Artificial Sequence
  SAMD9L targeting guide sequence portion
ugaaacuggauagguagaagu

SEQ ID NO: 16466 - RNA, 21 nt, Artificial Sequence
  SAMD9L targeting guide sequence portion
ugaaaguugggguuuugugac

SEQ ID NO: 16467 - RNA, 21 nt, Artificial Sequence
  SAMD9L targeting guide sequence portion
ugaaauaagcuauagcugcua

SEQ ID NO: 16468 - RNA, 21 nt, Artificial Sequence
  SAMD9L targeting guide sequence portion
ugaauuaggaugguaaaauag

SEQ ID NO: 16469 - RNA, 21 nt, Artificial Sequence
  SAMD9L targeting guide sequence portion
ugacacaccuuuuagccuuau

SEQ ID NO: 16470 - RNA, 21 nt, Artificial Sequence
  SAMD9L targeting guide sequence portion
ugacucuaauuguaauuauga

SEQ ID NO: 16471 - RNA, 21 nt, Artificial Sequence
  SAMD9L targeting guide sequence portion
ugacucuuaaaacugcuugau

SEQ ID NO: 16472 - RNA, 21 nt, Artificial Sequence
  SAMD9L targeting guide sequence portion
ugacuuaaaagcagaaucuua

SEQ ID NO: 16473 - RNA, 21 nt, Artificial Sequence
  SAMD9L targeting guide sequence portion
ugagacaaagcaauauaauaa

SEQ ID NO: 16474 - RNA, 21 nt, Artificial Sequence
  SAMD9L targeting guide sequence portion
ugaggaacaggaauccacagc

SEQ ID NO: 16475 - RNA, 21 nt, Artificial Sequence
  SAMD9L targeting guide sequence portion
ugaguuccaaaagaaaacaga

SEQ ID NO: 16476 - RNA, 21 nt, Artificial Sequence
  SAMD9L targeting guide sequence portion
ugauaauguauacauaauugu

SEQ ID NO: 16477 - RNA, 21 nt, Artificial Sequence
  SAMD9L targeting guide sequence portion
ugauacuuacuuuagcuauuu

SEQ ID NO: 16478 - RNA, 21 nt, Artificial Sequence
  SAMD9L targeting guide sequence portion
ugauuuuaaaaauaaaguaua

SEQ ID NO: 16479 - RNA, 21 nt, Artificial Sequence
  SAMD9L targeting guide sequence portion
ugcaaauaaacuuuaaaauaa

SEQ ID NO: 16480 - RNA, 21 nt, Artificial Sequence
  SAMD9L targeting guide sequence portion
ugcaauauuccuauaugcuac

SEQ ID NO: 16481 - RNA, 21 nt, Artificial Sequence
  SAMD9L targeting guide sequence portion
ugcuaaaggcugacucuuaaa

SEQ ID NO: 16482 - RNA, 21 nt, Artificial Sequence
  SAMD9L targeting guide sequence portion
ugcuaacuggugacacaccuu

SEQ ID NO: 16483 - RNA, 21 nt, Artificial Sequence
  SAMD9L targeting guide sequence portion
ugcuacggaaaccaauuucua

SEQ ID NO: 16484 - RNA, 21 nt, Artificial Sequence
  SAMD9L targeting guide sequence portion
ugcucuguuacuauguaacaa

SEQ ID NO: 16485 - RNA, 21 nt, Artificial Sequence
  SAMD9L targeting guide sequence portion
ugcuugauacuuacuuuagcu

SEQ ID NO: 16486 - RNA, 21 nt, Artificial Sequence
  SAMD9L targeting guide sequence portion
ugcuuuuaagucacaaaaccc

SEQ ID NO: 16487 - RNA, 21 nt, Artificial Sequence
  SAMD9L targeting guide sequence portion
uggauagguagaaguggguug

SEQ ID NO: 16488 - RNA, 21 nt, Artificial Sequence
  SAMD9L targeting guide sequence portion
uggauuccuguuccucaaccc

SEQ ID NO: 16489 - RNA, 21 nt, Artificial Sequence
  SAMD9L targeting guide sequence portion
uggcuaucuuuguuacauagu

SEQ ID NO: 16490 - RNA, 21 nt, Artificial Sequence
  SAMD9L targeting guide sequence portion
ugggguuuugugacuuaaaag

SEQ ID NO: 16491 - RNA, 21 nt, Artificial Sequence
  SAMD9L targeting guide sequence portion
uggguugaggaacaggaaucc

SEQ ID NO: 16492 - RNA, 21 nt, Artificial Sequence
  SAMD9L targeting guide sequence portion
ugguaaaauagcuaaaguaag

SEQ ID NO: 16493 - RNA, 21 nt, Artificial Sequence
  SAMD9L targeting guide sequence portion
uggugaaaguugggguuuugu

SEQ ID NO: 16494 - RNA, 21 nt, Artificial Sequence
  SAMD9L targeting guide sequence portion
uggugacacaccuuuuagccu

SEQ ID NO: 16495 - RNA, 21 nt, Artificial Sequence
  SAMD9L targeting guide sequence portion
ugguuaaauaaucuguuuucu

SEQ ID NO: 16496 - RNA, 21 nt, Artificial Sequence
  SAMD9L targeting guide sequence portion
ugguuuccguagcauauagga

SEQ ID NO: 16497 - RNA, 21 nt, Artificial Sequence
  SAMD9L targeting guide sequence portion
uguaacaaagauagccagcug

SEQ ID NO: 16498 - RNA, 21 nt, Artificial Sequence
  SAMD9L targeting guide sequence portion
uguaauuaugaaauaagcuau

SEQ ID NO: 16499 - RNA, 21 nt, Artificial Sequence
  SAMD9L targeting guide sequence portion
uguauaauauugcuaaaggcu

SEQ ID NO: 16500 - RNA, 21 nt, Artificial Sequence
  SAMD9L targeting guide sequence portion
uguauacauaauugucuaugu

SEQ ID NO: 16501 - RNA, 21 nt, Artificial Sequence
  SAMD9L targeting guide sequence portion
uguauacauuaucauacagaa

SEQ ID NO: 16502 - RNA, 21 nt, Artificial Sequence
  SAMD9L targeting guide sequence portion
uguaucuucuguaugauaaug

SEQ ID NO: 16503 - RNA, 21 nt, Artificial Sequence
  SAMD9L targeting guide sequence portion
uguaugauaauguauacauaa

SEQ ID NO: 16504 - RNA, 21 nt, Artificial Sequence
  SAMD9L targeting guide sequence portion
ugucaccaguuagcagcuaua

SEQ ID NO: 16505 - RNA, 21 nt, Artificial Sequence
  SAMD9L targeting guide sequence portion
ugucuaugugauuuuaaaaau

SEQ ID NO: 16506 - RNA, 21 nt, Artificial Sequence
  SAMD9L targeting guide sequence portion
ugugacuuaaaagcagaaucu

SEQ ID NO: 16507 - RNA, 21 nt, Artificial Sequence
  SAMD9L targeting guide sequence portion
ugugauuuuaaaaauaaagua

SEQ ID NO: 16508 - RNA, 21 nt, Artificial Sequence
  SAMD9L targeting guide sequence portion
uguggauuccuguuccucaac

SEQ ID NO: 16509 - RNA, 21 nt, Artificial Sequence
  SAMD9L targeting guide sequence portion
ugugucaccaguuagcagcua

SEQ ID NO: 16510 - RNA, 21 nt, Artificial Sequence
  SAMD9L targeting guide sequence portion
uguuacauaguaacagagcag

SEQ ID NO: 16511 - RNA, 21 nt, Artificial Sequence
  SAMD9L targeting guide sequence portion
uguuacuauguaacaaagaua

SEQ ID NO: 16512 - RNA, 21 nt, Artificial Sequence
  SAMD9L targeting guide sequence portion
uguuacuuaagauucugcuuu

SEQ ID NO: 16513 - RNA, 21 nt, Artificial Sequence
  SAMD9L targeting guide sequence portion
uguuccucaacccacuucuac

SEQ ID NO: 16514 - RNA, 21 nt, Artificial Sequence
  SAMD9L targeting guide sequence portion
uguuucuuaggugacucuaau

SEQ ID NO: 16515 - RNA, 21 nt, Artificial Sequence
  SAMD9L targeting guide sequence portion
uuaaaaauaaaguauaauucu

SEQ ID NO: 16516 - RNA, 21 nt, Artificial Sequence
  SAMD9L targeting guide sequence portion
uuaaaacugcuugauacuuac

SEQ ID NO: 16517 - RNA, 21 nt, Artificial Sequence
  SAMD9L targeting guide sequence portion
uuaaaagcagaaucuuaagua

SEQ ID NO: 16518 - RNA, 21 nt, Artificial Sequence
  SAMD9L targeting guide sequence portion
uuaaaauaaugaaacuggaua

SEQ ID NO: 16519 - RNA, 21 nt, Artificial Sequence
  SAMD9L targeting guide sequence portion
uuaaaaucacauagacaauua

SEQ ID NO: 16520 - RNA, 21 nt, Artificial Sequence
  SAMD9L targeting guide sequence portion
uuaaaguuuauuugcaauauu

SEQ ID NO: 16521 - RNA, 21 nt, Artificial Sequence
  SAMD9L targeting guide sequence portion
uuaaauaaucuguuuucuuuu

SEQ ID NO: 16522 - RNA, 21 nt, Artificial Sequence
  SAMD9L targeting guide sequence portion
uuaaccaacugcucuguuacu

SEQ ID NO: 16523 - RNA, 21 nt, Artificial Sequence
  SAMD9L targeting guide sequence portion
uuaacuuggugaaaguugggg

SEQ ID NO: 16524 - RNA, 21 nt, Artificial Sequence
  SAMD9L targeting guide sequence portion
uuaagagucagccuuuagcaa

SEQ ID NO: 16525 - RNA, 21 nt, Artificial Sequence
  SAMD9L targeting guide sequence portion
uuaagauucugcuuuuaaguc

SEQ ID NO: 16526 - RNA, 21 nt, Artificial Sequence
  SAMD9L targeting guide sequence portion
uuaagcuaaaagggagaauua

SEQ ID NO: 16527 - RNA, 21 nt, Artificial Sequence
  SAMD9L targeting guide sequence portion
uuaaguaacauagaaauuggu

SEQ ID NO: 16528 - RNA, 21 nt, Artificial Sequence
  SAMD9L targeting guide sequence portion
uuaagucacaaaaccccaacu

SEQ ID NO: 16529 - RNA, 21 nt, Artificial Sequence
  SAMD9L targeting guide sequence portion
uuacaauuagagucaccuaag

SEQ ID NO: 16530 - RNA, 21 nt, Artificial Sequence
  SAMD9L targeting guide sequence portion
uuacauaguaacagagcaguu

SEQ ID NO: 16531 - RNA, 21 nt, Artificial Sequence
  SAMD9L targeting guide sequence portion
uuaccauccuaauucauaccc

SEQ ID NO: 16532 - RNA, 21 nt, Artificial Sequence
  SAMD9L targeting guide sequence portion
uuacuauguaacaaagauagc

SEQ ID NO: 16533 - RNA, 21 nt, Artificial Sequence
  SAMD9L targeting guide sequence portion
uuacuuaagauucugcuuuua

SEQ ID NO: 16534 - RNA, 21 nt, Artificial Sequence
  SAMD9L targeting guide sequence portion
uuacuuuagcuauuuuaccau

SEQ ID NO: 16535 - RNA, 21 nt, Artificial Sequence
  SAMD9L targeting guide sequence portion
uuagaauuauacuuuauuuuu

SEQ ID NO: 16536 - RNA, 21 nt, Artificial Sequence
  SAMD9L targeting guide sequence portion
uuagagucaccuaagaaacaa

SEQ ID NO: 16537 - RNA, 21 nt, Artificial Sequence
  SAMD9L targeting guide sequence portion
uuagcaauauuauacauauau

SEQ ID NO: 16538 - RNA, 21 nt, Artificial Sequence
  SAMD9L targeting guide sequence portion
uuagcagcuauagcuuauuuc

SEQ ID NO: 16539 - RNA, 21 nt, Artificial Sequence
  SAMD9L targeting guide sequence portion
uuagcuauuuuaccauccuaa

SEQ ID NO: 16540 - RNA, 21 nt, Artificial Sequence
  SAMD9L targeting guide sequence portion
uuagcuuaacuuggugaaagu

SEQ ID NO: 16541 - RNA, 21 nt, Artificial Sequence
  SAMD9L targeting guide sequence portion
uuaggaugguaaaauagcuaa

SEQ ID NO: 16542 - RNA, 21 nt, Artificial Sequence
  SAMD9L targeting guide sequence portion
uuaggugacucuaauuguaau

SEQ ID NO: 16543 - RNA, 21 nt, Artificial Sequence
  SAMD9L targeting guide sequence portion
uuauaaggcuaaaaggugugu

SEQ ID NO: 16544 - RNA, 21 nt, Artificial Sequence
  SAMD9L targeting guide sequence portion
uuauaauaauucucccuuuua

SEQ ID NO: 16545 - RNA, 21 nt, Artificial Sequence
  SAMD9L targeting guide sequence portion
uuauacauauauauauguauc

SEQ ID NO: 16546 - RNA, 21 nt, Artificial Sequence
  SAMD9L targeting guide sequence portion
uuauacuuuauuuuuaaaauc

SEQ ID NO: 16547 - RNA, 21 nt, Artificial Sequence
  SAMD9L targeting guide sequence portion
uuaucauacagaagauacaua

SEQ ID NO: 16548 - RNA, 21 nt, Artificial Sequence
  SAMD9L targeting guide sequence portion
uuaugaaauaagcuauagcug

SEQ ID NO: 16549 - RNA, 21 nt, Artificial Sequence
  SAMD9L targeting guide sequence portion
uuauguauacauuaucauaca

SEQ ID NO: 16550 - RNA, 21 nt, Artificial Sequence
  SAMD9L targeting guide sequence portion
uuauuauaaggcuaaaaggug

SEQ ID NO: 16551 - RNA, 21 nt, Artificial Sequence
  SAMD9L targeting guide sequence portion
uuauuuaaccaacugcucugu

SEQ ID NO: 16552 - RNA, 21 nt, Artificial Sequence
  SAMD9L targeting guide sequence portion
uuauuucauaauuacaauuag

SEQ ID NO: 16553 - RNA, 21 nt, Artificial Sequence
  SAMD9L targeting guide sequence portion
uuauuugcaauauuccuauau

SEQ ID NO: 16554 - RNA, 21 nt, Artificial Sequence
  SAMD9L targeting guide sequence portion
uuauuuuaaaguuuauuugca

SEQ ID NO: 16555 - RNA, 21 nt, Artificial Sequence
  SAMD9L targeting guide sequence portion
uuauuuuuaaaaucacauaga

SEQ ID NO: 16556 - RNA, 21 nt, Artificial Sequence
  SAMD9L targeting guide sequence portion
uucaccaaguuaagcuaaaag

SEQ ID NO: 16557 - RNA, 21 nt, Artificial Sequence
  SAMD9L targeting guide sequence portion
uucauaauuacaauuagaguc

SEQ ID NO: 16558 - RNA, 21 nt, Artificial Sequence
  SAMD9L targeting guide sequence portion
uucauacccuuguuucuuagg

SEQ ID NO: 16559 - RNA, 21 nt, Artificial Sequence
  SAMD9L targeting guide sequence portion
uucauuauuuuaaaguuuauu

SEQ ID NO: 16560 - RNA, 21 nt, Artificial Sequence
  SAMD9L targeting guide sequence portion
uuccaaaagaaaacagauuau

SEQ ID NO: 16561 - RNA, 21 nt, Artificial Sequence
  SAMD9L targeting guide sequence portion
uuccguagcauauaggaauau

SEQ ID NO: 16562 - RNA, 21 nt, Artificial Sequence
  SAMD9L targeting guide sequence portion
uuccuauaugcuacggaaacc

SEQ ID NO: 16563 - RNA, 21 nt, Artificial Sequence
  SAMD9L targeting guide sequence portion
uuccucaacccacuucuaccu

SEQ ID NO: 16564 - RNA, 21 nt, Artificial Sequence
  SAMD9L targeting guide sequence portion
uuccuguuccucaacccacuu

SEQ ID NO: 16565 - RNA, 21 nt, Artificial Sequence
  SAMD9L targeting guide sequence portion
uucuaaaauacuuauuauauu

SEQ ID NO: 16566 - RNA, 21 nt, Artificial Sequence
  SAMD9L targeting guide sequence portion
uucuaccuauccaguuucauu

SEQ ID NO: 16567 - RNA, 21 nt, Artificial Sequence
  SAMD9L targeting guide sequence portion
uucuauguuacuuaagauucu

SEQ ID NO: 16568 - RNA, 21 nt, Artificial Sequence
  SAMD9L targeting guide sequence portion
uucucccuuuuagcuuaacuu

SEQ ID NO: 16569 - RNA, 21 nt, Artificial Sequence
  SAMD9L targeting guide sequence portion
uucugcuuuuaagucacaaaa

SEQ ID NO: 16570 - RNA, 21 nt, Artificial Sequence
  SAMD9L targeting guide sequence portion
uucuguaugauaauguauaca

SEQ ID NO: 16571 - RNA, 21 nt, Artificial Sequence
  SAMD9L targeting guide sequence portion
uucuuaggugacucuaauugu

SEQ ID NO: 16572 - RNA, 21 nt, Artificial Sequence
  SAMD9L targeting guide sequence portion
uugaggaacaggaauccacag

SEQ ID NO: 16573 - RNA, 21 nt, Artificial Sequence
  SAMD9L targeting guide sequence portion
uugaguuccaaaagaaaacag

SEQ ID NO: 16574 - RNA, 21 nt, Artificial Sequence
  SAMD9L targeting guide sequence portion
uugauacuuacuuuagcuauu

SEQ ID NO: 16575 - RNA, 21 nt, Artificial Sequence
  SAMD9L targeting guide sequence portion
uugcaaauaaacuuuaaaaua

SEQ ID NO: 16576 - RNA, 21 nt, Artificial Sequence
  SAMD9L targeting guide sequence portion
uugcaauauuccuauaugcua

SEQ ID NO: 16577 - RNA, 21 nt, Artificial Sequence
  SAMD9L targeting guide sequence portion
uugcuaaaggcugacucuuaa

SEQ ID NO: 16578 - RNA, 21 nt, Artificial Sequence
  SAMD9L targeting guide sequence portion
uugggguuuugugacuuaaaa

SEQ ID NO: 16579 - RNA, 21 nt, Artificial Sequence
  SAMD9L targeting guide sequence portion
uuggugaaaguugggguuuug

SEQ ID NO: 16580 - RNA, 21 nt, Artificial Sequence
  SAMD9L targeting guide sequence portion
uugguuaaauaaucuguuuuc

SEQ ID NO: 16581 - RNA, 21 nt, Artificial Sequence
  SAMD9L targeting guide sequence portion
uugguuuccguagcauauagg

SEQ ID NO: 16582 - RNA, 21 nt, Artificial Sequence
  SAMD9L targeting guide sequence portion
uuguaauuaugaaauaagcua

SEQ ID NO: 16583 - RNA, 21 nt, Artificial Sequence
  SAMD9L targeting guide sequence portion
uugucuaugugauuuuaaaaa

SEQ ID NO: 16584 - RNA, 21 nt, Artificial Sequence
  SAMD9L targeting guide sequence portion
uugugacuuaaaagcagaauc

SEQ ID NO: 16585 - RNA, 21 nt, Artificial Sequence
  SAMD9L targeting guide sequence portion
uuguuacauaguaacagagca

SEQ ID NO: 16586 - RNA, 21 nt, Artificial Sequence
  SAMD9L targeting guide sequence portion
uuguuucuuaggugacucuaa

SEQ ID NO: 16587 - RNA, 21 nt, Artificial Sequence
  SAMD9L targeting guide sequence portion
uuuaaaaauaaaguauaauuc

SEQ ID NO: 16588 - RNA, 21 nt, Artificial Sequence
  SAMD9L targeting guide sequence portion
uuuaaaauaaugaaacuggau

SEQ ID NO: 16589 - RNA, 21 nt, Artificial Sequence
  SAMD9L targeting guide sequence portion
uuuaaaaucacauagacaauu

SEQ ID NO: 16590 - RNA, 21 nt, Artificial Sequence
  SAMD9L targeting guide sequence portion
uuuaaaguuuauuugcaauau

SEQ ID NO: 16591 - RNA, 21 nt, Artificial Sequence
  SAMD9L targeting guide sequence portion
uuuaaccaacugcucuguuac

SEQ ID NO: 16592 - RNA, 21 nt, Artificial Sequence
  SAMD9L targeting guide sequence portion
uuuaagagucagccuuuagca

SEQ ID NO: 16593 - RNA, 21 nt, Artificial Sequence
  SAMD9L targeting guide sequence portion
uuuaagucacaaaaccccaac

SEQ ID NO: 16594 - RNA, 21 nt, Artificial Sequence
  SAMD9L targeting guide sequence portion
uuuaccauccuaauucauacc

SEQ ID NO: 16595 - RNA, 21 nt, Artificial Sequence
  SAMD9L targeting guide sequence portion
uuuagaauuauacuuuauuuu

SEQ ID NO: 16596 - RNA, 21 nt, Artificial Sequence
  SAMD9L targeting guide sequence portion
uuuagcaauauuauacauaua

SEQ ID NO: 16597 - RNA, 21 nt, Artificial Sequence
  SAMD9L targeting guide sequence portion
uuuagcuauuuuaccauccua

SEQ ID NO: 16598 - RNA, 21 nt, Artificial Sequence
  SAMD9L targeting guide sequence portion
uuuagcuuaacuuggugaaag

SEQ ID NO: 16599 - RNA, 21 nt, Artificial Sequence
  SAMD9L targeting guide sequence portion
uuuauuugcaauauuccuaua

SEQ ID NO: 16600 - RNA, 21 nt, Artificial Sequence
  SAMD9L targeting guide sequence portion
uuuauuuuuaaaaucacauag

SEQ ID NO: 16601 - RNA, 21 nt, Artificial Sequence
  SAMD9L targeting guide sequence portion
uuucaccaaguuaagcuaaaa

SEQ ID NO: 16602 - RNA, 21 nt, Artificial Sequence
  SAMD9L targeting guide sequence portion
uuucauaauuacaauuagagu

SEQ ID NO: 16603 - RNA, 21 nt, Artificial Sequence
  SAMD9L targeting guide sequence portion
uuucauuauuuuaaaguuuau

SEQ ID NO: 16604 - RNA, 21 nt, Artificial Sequence
  SAMD9L targeting guide sequence portion
uuuccguagcauauaggaaua

SEQ ID NO: 16605 - RNA, 21 nt, Artificial Sequence
  SAMD9L targeting guide sequence portion
uuucuauguuacuuaagauuc

SEQ ID NO: 16606 - RNA, 21 nt, Artificial Sequence
  SAMD9L targeting guide sequence portion
uuucuuaggugacucuaauug

SEQ ID NO: 16607 - RNA, 21 nt, Artificial Sequence
  SAMD9L targeting guide sequence portion
uuugcaauauuccuauaugcu

SEQ ID NO: 16608 - RNA, 21 nt, Artificial Sequence
  SAMD9L targeting guide sequence portion
uuugugacuuaaaagcagaau

SEQ ID NO: 16609 - RNA, 21 nt, Artificial Sequence
  SAMD9L targeting guide sequence portion
uuuguuacauaguaacagagc

SEQ ID NO: 16610 - RNA, 21 nt, Artificial Sequence
  SAMD9L targeting guide sequence portion
uuuuaaaaauaaaguauaauu

SEQ ID NO: 16611 - RNA, 21 nt, Artificial Sequence
  SAMD9L targeting guide sequence portion
uuuuaaaaucacauagacaau

SEQ ID NO: 16612 - RNA, 21 nt, Artificial Sequence
  SAMD9L targeting guide sequence portion
uuuuaaaguuuauuugcaaua

SEQ ID NO: 16613 - RNA, 21 nt, Artificial Sequence
  SAMD9L targeting guide sequence portion
uuuuaagagucagccuuuagc

SEQ ID NO: 16614 - RNA, 21 nt, Artificial Sequence
  SAMD9L targeting guide sequence portion
uuuuaagucacaaaaccccaa

SEQ ID NO: 16615 - RNA, 21 nt, Artificial Sequence
  SAMD9L targeting guide sequence portion
uuuuaccauccuaauucauac

SEQ ID NO: 16616 - RNA, 21 nt, Artificial Sequence
  SAMD9L targeting guide sequence portion
uuuuagaauuauacuuuauuu

SEQ ID NO: 16617 - RNA, 21 nt, Artificial Sequence
  SAMD9L targeting guide sequence portion
uuuuagccuuauaauaauucu

SEQ ID NO: 16618 - RNA, 21 nt, Artificial Sequence
  SAMD9L targeting guide sequence portion
uuuuagcuuaacuuggugaaa

SEQ ID NO: 16619 - RNA, 21 nt, Artificial Sequence
  SAMD9L targeting guide sequence portion
uuuugugacuuaaaagcagaa

SEQ ID NO: 16620 - RNA, 21 nt, Artificial Sequence
  SAMD9L targeting guide sequence portion
uuuuuaaaaucacauagacaa

SEQ ID NO: 16621 - RNA, 22 nt, Artificial Sequence
  SAMD9L targeting guide sequence portion
aaaaauaaaguauaauucuaaa

SEQ ID NO: 16622 - RNA, 22 nt, Artificial Sequence
  SAMD9L targeting guide sequence portion
aaaacagauuauuuaaccaacu

SEQ ID NO: 16623 - RNA, 22 nt, Artificial Sequence
  SAMD9L targeting guide sequence portion
aaaaccccaacuuucaccaagu

SEQ ID NO: 16624 - RNA, 22 nt, Artificial Sequence
  SAMD9L targeting guide sequence portion
aaaacugcuugauacuuacuuu

SEQ ID NO: 16625 - RNA, 22 nt, Artificial Sequence
  SAMD9L targeting guide sequence portion
aaaagaaaacagauuauuuaac

SEQ ID NO: 16626 - RNA, 22 nt, Artificial Sequence
  SAMD9L targeting guide sequence portion
aaaagcagaaucuuaaguaaca

SEQ ID NO: 16627 - RNA, 22 nt, Artificial Sequence
  SAMD9L targeting guide sequence portion
aaaagggagaauuauuauaagg

SEQ ID NO: 16628 - RNA, 22 nt, Artificial Sequence
  SAMD9L targeting guide sequence portion
aaaaggugugucaccaguuagc

SEQ ID NO: 16629 - RNA, 22 nt, Artificial Sequence
  SAMD9L targeting guide sequence portion
aaaauaaaguauaauucuaaaa

SEQ ID NO: 16630 - RNA, 22 nt, Artificial Sequence
  SAMD9L targeting guide sequence portion
aaaauaaugaaacuggauaggu

SEQ ID NO: 16631 - RNA, 22 nt, Artificial Sequence
  SAMD9L targeting guide sequence portion
aaaauacuuauuauauugcuuu

SEQ ID NO: 16632 - RNA, 22 nt, Artificial Sequence
  SAMD9L targeting guide sequence portion
aaaauagcuaaaguaaguauca

SEQ ID NO: 16633 - RNA, 22 nt, Artificial Sequence
  SAMD9L targeting guide sequence portion
aaaaucacauagacaauuaugu

SEQ ID NO: 16634 - RNA, 22 nt, Artificial Sequence
  SAMD9L targeting guide sequence portion
aaacaaggguaugaauuaggau

SEQ ID NO: 16635 - RNA, 22 nt, Artificial Sequence
  SAMD9L targeting guide sequence portion
aaacagauuauuuaaccaacug

SEQ ID NO: 16636 - RNA, 22 nt, Artificial Sequence
  SAMD9L targeting guide sequence portion
aaaccaauuucuauguuacuua

SEQ ID NO: 16637 - RNA, 22 nt, Artificial Sequence
  SAMD9L targeting guide sequence portion
aaaccccaacuuucaccaaguu

SEQ ID NO: 16638 - RNA, 22 nt, Artificial Sequence
  SAMD9L targeting guide sequence portion
aaacugcuugauacuuacuuua

SEQ ID NO: 16639 - RNA, 22 nt, Artificial Sequence
  SAMD9L targeting guide sequence portion
aaacuggauagguagaaguggg

SEQ ID NO: 16640 - RNA, 22 nt, Artificial Sequence
  SAMD9L targeting guide sequence portion
aaacuuuaaaauaaugaaacug

SEQ ID NO: 16641 - RNA, 22 nt, Artificial Sequence
  SAMD9L targeting guide sequence portion
aaagaaaacagauuauuuaacc

SEQ ID NO: 16642 - RNA, 22 nt, Artificial Sequence
  SAMD9L targeting guide sequence portion
aaagauagccagcuguggauuc

SEQ ID NO: 16643 - RNA, 22 nt, Artificial Sequence
  SAMD9L targeting guide sequence portion
aaagcaauauaauaaguauuuu

SEQ ID NO: 16644 - RNA, 22 nt, Artificial Sequence
  SAMD9L targeting guide sequence portion
aaagcagaaucuuaaguaacau

SEQ ID NO: 16645 - RNA, 22 nt, Artificial Sequence
  SAMD9L targeting guide sequence portion
aaaggcugacucuuaaaacugc

SEQ ID NO: 16646 - RNA, 22 nt, Artificial Sequence
  SAMD9L targeting guide sequence portion
aaagggagaauuauuauaaggc

SEQ ID NO: 16647 - RNA, 22 nt, Artificial Sequence
  SAMD9L targeting guide sequence portion
aaaggugugucaccaguuagca

SEQ ID NO: 16648 - RNA, 22 nt, Artificial Sequence
  SAMD9L targeting guide sequence portion
aaaguaaguaucaagcaguuuu

SEQ ID NO: 16649 - RNA, 22 nt, Artificial Sequence
  SAMD9L targeting guide sequence portion
aaaguauaauucuaaaauacuu

SEQ ID NO: 16650 - RNA, 22 nt, Artificial Sequence
  SAMD9L targeting guide sequence portion
aaaguugggguuuugugacuua

SEQ ID NO: 16651 - RNA, 22 nt, Artificial Sequence
  SAMD9L targeting guide sequence portion
aaaguuuauuugcaauauuccu

SEQ ID NO: 16652 - RNA, 22 nt, Artificial Sequence
  SAMD9L targeting guide sequence portion
aaauaaacuuuaaaauaaugaa

SEQ ID NO: 16653 - RNA, 22 nt, Artificial Sequence
  SAMD9L targeting guide sequence portion
aaauaaaguauaauucuaaaau

SEQ ID NO: 16654 - RNA, 22 nt, Artificial Sequence
  SAMD9L targeting guide sequence portion
aaauaagcuauagcugcuaacu

SEQ ID NO: 16655 - RNA, 22 nt, Artificial Sequence
  SAMD9L targeting guide sequence portion
aaauaaucuguuuucuuuugga

SEQ ID NO: 16656 - RNA, 22 nt, Artificial Sequence
  SAMD9L targeting guide sequence portion
aaauaaugaaacuggauaggua

SEQ ID NO: 16657 - RNA, 22 nt, Artificial Sequence
  SAMD9L targeting guide sequence portion
aaauacuuauuauauugcuuug

SEQ ID NO: 16658 - RNA, 22 nt, Artificial Sequence
  SAMD9L targeting guide sequence portion
aaauagcuaaaguaaguaucaa

SEQ ID NO: 16659 - RNA, 22 nt, Artificial Sequence
  SAMD9L targeting guide sequence portion
aaaucacauagacaauuaugua

SEQ ID NO: 16660 - RNA, 22 nt, Artificial Sequence
  SAMD9L targeting guide sequence portion
aaauugguuuccguagcauaua

SEQ ID NO: 16661 - RNA, 22 nt, Artificial Sequence
  SAMD9L targeting guide sequence portion
aacaaagauagccagcugugga

SEQ ID NO: 16662 - RNA, 22 nt, Artificial Sequence
  SAMD9L targeting guide sequence portion
aacaaggguaugaauuaggaug

SEQ ID NO: 16663 - RNA, 22 nt, Artificial Sequence
  SAMD9L targeting guide sequence portion
aacagagcaguugguuaaauaa

SEQ ID NO: 16664 - RNA, 22 nt, Artificial Sequence
  SAMD9L targeting guide sequence portion
aacagauuauuuaaccaacugc

SEQ ID NO: 16665 - RNA, 22 nt, Artificial Sequence
  SAMD9L targeting guide sequence portion
aacagcuugaguuccaaaagaa

SEQ ID NO: 16666 - RNA, 22 nt, Artificial Sequence
  SAMD9L targeting guide sequence portion
aacaggaauccacagcuggcua

SEQ ID NO: 16667 - RNA, 22 nt, Artificial Sequence
  SAMD9L targeting guide sequence portion
aacauagaaauugguuuccgua

SEQ ID NO: 16668 - RNA, 22 nt, Artificial Sequence
  SAMD9L targeting guide sequence portion
aaccaacugcucuguuacuaug

SEQ ID NO: 16669 - RNA, 22 nt, Artificial Sequence
  SAMD9L targeting guide sequence portion
aaccaauuucuauguuacuuaa

SEQ ID NO: 16670 - RNA, 22 nt, Artificial Sequence
  SAMD9L targeting guide sequence portion
aacccacuucuaccuauccagu

SEQ ID NO: 16671 - RNA, 22 nt, Artificial Sequence
  SAMD9L targeting guide sequence portion
aaccccaacuuucaccaaguua

SEQ ID NO: 16672 - RNA, 22 nt, Artificial Sequence
  SAMD9L targeting guide sequence portion
aacugcucuguuacuauguaac

SEQ ID NO: 16673 - RNA, 22 nt, Artificial Sequence
  SAMD9L targeting guide sequence portion
aacugcuugauacuuacuuuag

SEQ ID NO: 16674 - RNA, 22 nt, Artificial Sequence
  SAMD9L targeting guide sequence portion
aacuggauagguagaagugggu

SEQ ID NO: 16675 - RNA, 22 nt, Artificial Sequence
  SAMD9L targeting guide sequence portion
aacuggugacacaccuuuuagc

SEQ ID NO: 16676 - RNA, 22 nt, Artificial Sequence
  SAMD9L targeting guide sequence portion
aacuuggugaaaguugggguuu

SEQ ID NO: 16677 - RNA, 22 nt, Artificial Sequence
  SAMD9L targeting guide sequence portion
aacuuuaaaauaaugaaacugg

SEQ ID NO: 16678 - RNA, 22 nt, Artificial Sequence
  SAMD9L targeting guide sequence portion
aacuuucaccaaguuaagcuaa

SEQ ID NO: 16679 - RNA, 22 nt, Artificial Sequence
  SAMD9L targeting guide sequence portion
aagaaaacagauuauuuaacca

SEQ ID NO: 16680 - RNA, 22 nt, Artificial Sequence
  SAMD9L targeting guide sequence portion
aagaaacaaggguaugaauuag

SEQ ID NO: 16681 - RNA, 22 nt, Artificial Sequence
  SAMD9L targeting guide sequence portion
aagagucagccuuuagcaauau

SEQ ID NO: 16682 - RNA, 22 nt, Artificial Sequence
  SAMD9L targeting guide sequence portion
aagauacauauauauauguaua

SEQ ID NO: 16683 - RNA, 22 nt, Artificial Sequence
  SAMD9L targeting guide sequence portion
aagauagccagcuguggauucc

SEQ ID NO: 16684 - RNA, 22 nt, Artificial Sequence
  SAMD9L targeting guide sequence portion
aagauucugcuuuuaagucaca

SEQ ID NO: 16685 - RNA, 22 nt, Artificial Sequence
  SAMD9L targeting guide sequence portion
aagcaauauaauaaguauuuua

SEQ ID NO: 16686 - RNA, 22 nt, Artificial Sequence
  SAMD9L targeting guide sequence portion
aagcagaaucuuaaguaacaua

SEQ ID NO: 16687 - RNA, 22 nt, Artificial Sequence
  SAMD9L targeting guide sequence portion
aagcaguuuuaagagucagccu

SEQ ID NO: 16688 - RNA, 22 nt, Artificial Sequence
  SAMD9L targeting guide sequence portion
aagcuaaaagggagaauuauua

SEQ ID NO: 16689 - RNA, 22 nt, Artificial Sequence
  SAMD9L targeting guide sequence portion
aagcuauagcugcuaacuggug

SEQ ID NO: 16690 - RNA, 22 nt, Artificial Sequence
  SAMD9L targeting guide sequence portion
aaggcuaaaaggugugucacca

SEQ ID NO: 16691 - RNA, 22 nt, Artificial Sequence
  SAMD9L targeting guide sequence portion
aaggcugacucuuaaaacugcu

SEQ ID NO: 16692 - RNA, 22 nt, Artificial Sequence
  SAMD9L targeting guide sequence portion
aagggagaauuauuauaaggcu

SEQ ID NO: 16693 - RNA, 22 nt, Artificial Sequence
  SAMD9L targeting guide sequence portion
aaggguaugaauuaggauggua

SEQ ID NO: 16694 - RNA, 22 nt, Artificial Sequence
  SAMD9L targeting guide sequence portion
aaggugugucaccaguuagcag

SEQ ID NO: 16695 - RNA, 22 nt, Artificial Sequence
  SAMD9L targeting guide sequence portion
aaguaacauagaaauugguuuc

SEQ ID NO: 16696 - RNA, 22 nt, Artificial Sequence
  SAMD9L targeting guide sequence portion
aaguaaguaucaagcaguuuua

SEQ ID NO: 16697 - RNA, 22 nt, Artificial Sequence
  SAMD9L targeting guide sequence portion
aaguauaauucuaaaauacuua

SEQ ID NO: 16698 - RNA, 22 nt, Artificial Sequence
  SAMD9L targeting guide sequence portion
aaguaucaagcaguuuuaagag

SEQ ID NO: 16699 - RNA, 22 nt, Artificial Sequence
  SAMD9L targeting guide sequence portion
aaguauuuuagaauuauacuuu

SEQ ID NO: 16700 - RNA, 22 nt, Artificial Sequence
  SAMD9L targeting guide sequence portion
aagucacaaaaccccaacuuuc

SEQ ID NO: 16701 - RNA, 22 nt, Artificial Sequence
  SAMD9L targeting guide sequence portion
aaguggguugaggaacaggaau

SEQ ID NO: 16702 - RNA, 22 nt, Artificial Sequence
  SAMD9L targeting guide sequence portion
aaguuaagcuaaaagggagaau

SEQ ID NO: 16703 - RNA, 22 nt, Artificial Sequence
  SAMD9L targeting guide sequence portion
aaguugggguuuugugacuuaa

SEQ ID NO: 16704 - RNA, 22 nt, Artificial Sequence
  SAMD9L targeting guide sequence portion
aaguuuauuugcaauauuccua

SEQ ID NO: 16705 - RNA, 22 nt, Artificial Sequence
  SAMD9L targeting guide sequence portion
aauaaacuuuaaaauaaugaaa

SEQ ID NO: 16706 - RNA, 22 nt, Artificial Sequence
  SAMD9L targeting guide sequence portion
aauaaaguauaauucuaaaaua

SEQ ID NO: 16707 - RNA, 22 nt, Artificial Sequence
  SAMD9L targeting guide sequence portion
aauaagcuauagcugcuaacug

SEQ ID NO: 16708 - RNA, 22 nt, Artificial Sequence
  SAMD9L targeting guide sequence portion
aauaaguauuuuagaauuauac

SEQ ID NO: 16709 - RNA, 22 nt, Artificial Sequence
  SAMD9L targeting guide sequence portion
aauaaucuguuuucuuuuggaa

SEQ ID NO: 16710 - RNA, 22 nt, Artificial Sequence
  SAMD9L targeting guide sequence portion
aauaaugaaacuggauagguag

SEQ ID NO: 16711 - RNA, 22 nt, Artificial Sequence
  SAMD9L targeting guide sequence portion
aauaauucucccuuuuagcuua

SEQ ID NO: 16712 - RNA, 22 nt, Artificial Sequence
  SAMD9L targeting guide sequence portion
aauagcuaaaguaaguaucaag

SEQ ID NO: 16713 - RNA, 22 nt, Artificial Sequence
  SAMD9L targeting guide sequence portion
aauauaauaaguauuuuagaau

SEQ ID NO: 16714 - RNA, 22 nt, Artificial Sequence
  SAMD9L targeting guide sequence portion
aauauuauacauauauauaugu

SEQ ID NO: 16715 - RNA, 22 nt, Artificial Sequence
  SAMD9L targeting guide sequence portion
aauauuccuauaugcuacggaa

SEQ ID NO: 16716 - RNA, 22 nt, Artificial Sequence
  SAMD9L targeting guide sequence portion
aauauugcaaauaaacuuuaaa

SEQ ID NO: 16717 - RNA, 22 nt, Artificial Sequence
  SAMD9L targeting guide sequence portion
aauauugcuaaaggcugacucu

SEQ ID NO: 16718 - RNA, 22 nt, Artificial Sequence
  SAMD9L targeting guide sequence portion
aaucacauagacaauuauguau

SEQ ID NO: 16719 - RNA, 22 nt, Artificial Sequence
  SAMD9L targeting guide sequence portion
aauccacagcuggcuaucuuug

SEQ ID NO: 16720 - RNA, 22 nt, Artificial Sequence
  SAMD9L targeting guide sequence portion
aaucuguuuucuuuuggaacuc

SEQ ID NO: 16721 - RNA, 22 nt, Artificial Sequence
  SAMD9L targeting guide sequence portion
aaucuuaaguaacauagaaauu

SEQ ID NO: 16722 - RNA, 22 nt, Artificial Sequence
  SAMD9L targeting guide sequence portion
aaugaaacuggauagguagaag

SEQ ID NO: 16723 - RNA, 22 nt, Artificial Sequence
  SAMD9L targeting guide sequence portion
aauguauacauaauugucuaug

SEQ ID NO: 16724 - RNA, 22 nt, Artificial Sequence
  SAMD9L targeting guide sequence portion
aauuacaauuagagucaccuaa

SEQ ID NO: 16725 - RNA, 22 nt, Artificial Sequence
  SAMD9L targeting guide sequence portion
aauuagagucaccuaagaaaca

SEQ ID NO: 16726 - RNA, 22 nt, Artificial Sequence
  SAMD9L targeting guide sequence portion
aauuaggaugguaaaauagcua

SEQ ID NO: 16727 - RNA, 22 nt, Artificial Sequence
  SAMD9L targeting guide sequence portion
aauuauacuuuauuuuuaaaau

SEQ ID NO: 16728 - RNA, 22 nt, Artificial Sequence
  SAMD9L targeting guide sequence portion
aauuaugaaauaagcuauagcu

SEQ ID NO: 16729 - RNA, 22 nt, Artificial Sequence
  SAMD9L targeting guide sequence portion
aauuauguauacauuaucauac

SEQ ID NO: 16730 - RNA, 22 nt, Artificial Sequence
  SAMD9L targeting guide sequence portion
aauuauuauaaggcuaaaaggu

SEQ ID NO: 16731 - RNA, 22 nt, Artificial Sequence
  SAMD9L targeting guide sequence portion
aauucauacccuuguuucuuag

SEQ ID NO: 16732 - RNA, 22 nt, Artificial Sequence
  SAMD9L targeting guide sequence portion
aauucuaaaauacuuauuauau

SEQ ID NO: 16733 - RNA, 22 nt, Artificial Sequence
  SAMD9L targeting guide sequence portion
aauucucccuuuuagcuuaacu

SEQ ID NO: 16734 - RNA, 22 nt, Artificial Sequence
  SAMD9L targeting guide sequence portion
aauugguuuccguagcauauag

SEQ ID NO: 16735 - RNA, 22 nt, Artificial Sequence
  SAMD9L targeting guide sequence portion
aauuguaauuaugaaauaagcu

SEQ ID NO: 16736 - RNA, 22 nt, Artificial Sequence
  SAMD9L targeting guide sequence portion
aauugucuaugugauuuuaaaa

SEQ ID NO: 16737 - RNA, 22 nt, Artificial Sequence
  SAMD9L targeting guide sequence portion
aauuucuauguuacuuaagauu

SEQ ID NO: 16738 - RNA, 22 nt, Artificial Sequence
  SAMD9L targeting guide sequence portion
acaaaaccccaacuuucaccaa

SEQ ID NO: 16739 - RNA, 22 nt, Artificial Sequence
  SAMD9L targeting guide sequence portion
acaaagauagccagcuguggau

SEQ ID NO: 16740 - RNA, 22 nt, Artificial Sequence
  SAMD9L targeting guide sequence portion
acaaagcaauauaauaaguauu

SEQ ID NO: 16741 - RNA, 22 nt, Artificial Sequence
  SAMD9L targeting guide sequence portion
acaaggguaugaauuaggaugg

SEQ ID NO: 16742 - RNA, 22 nt, Artificial Sequence
  SAMD9L targeting guide sequence portion
acaauuagagucaccuaagaaa

SEQ ID NO: 16743 - RNA, 22 nt, Artificial Sequence
  SAMD9L targeting guide sequence portion
acaauuauguauacauuaucau

SEQ ID NO: 16744 - RNA, 22 nt, Artificial Sequence
  SAMD9L targeting guide sequence portion
acacaccuuuuagccuuauaau

SEQ ID NO: 16745 - RNA, 22 nt, Artificial Sequence
  SAMD9L targeting guide sequence portion
acaccuuuuagccuuauaauaa

SEQ ID NO: 16746 - RNA, 22 nt, Artificial Sequence
  SAMD9L targeting guide sequence portion
acagaagauacauauauauaug

SEQ ID NO: 16747 - RNA, 22 nt, Artificial Sequence
  SAMD9L targeting guide sequence portion
acagagcaguugguuaaauaau

SEQ ID NO: 16748 - RNA, 22 nt, Artificial Sequence
  SAMD9L targeting guide sequence portion
acagauuauuuaaccaacugcu

SEQ ID NO: 16749 - RNA, 22 nt, Artificial Sequence
  SAMD9L targeting guide sequence portion
acagcuggcuaucuuuguuaca

SEQ ID NO: 16750 - RNA, 22 nt, Artificial Sequence
  SAMD9L targeting guide sequence portion
acagcuugaguuccaaaagaaa

SEQ ID NO: 16751 - RNA, 22 nt, Artificial Sequence
  SAMD9L targeting guide sequence portion
acaggaauccacagcuggcuau

SEQ ID NO: 16752 - RNA, 22 nt, Artificial Sequence
  SAMD9L targeting guide sequence portion
acauaauugucuaugugauuuu

SEQ ID NO: 16753 - RNA, 22 nt, Artificial Sequence
  SAMD9L targeting guide sequence portion
acauagaaauugguuuccguag

SEQ ID NO: 16754 - RNA, 22 nt, Artificial Sequence
  SAMD9L targeting guide sequence portion
acauagacaauuauguauacau

SEQ ID NO: 16755 - RNA, 22 nt, Artificial Sequence
  SAMD9L targeting guide sequence portion
acauaguaacagagcaguuggu

SEQ ID NO: 16756 - RNA, 22 nt, Artificial Sequence
  SAMD9L targeting guide sequence portion
acauauauauauguauaauauu

SEQ ID NO: 16757 - RNA, 22 nt, Artificial Sequence
  SAMD9L targeting guide sequence portion
acauauauauauguaucuucug

SEQ ID NO: 16758 - RNA, 22 nt, Artificial Sequence
  SAMD9L targeting guide sequence portion
acauuaucauacagaagauaca

SEQ ID NO: 16759 - RNA, 22 nt, Artificial Sequence
  SAMD9L targeting guide sequence portion
accaacugcucuguuacuaugu

SEQ ID NO: 16760 - RNA, 22 nt, Artificial Sequence
  SAMD9L targeting guide sequence portion
accaaguuaagcuaaaagggag

SEQ ID NO: 16761 - RNA, 22 nt, Artificial Sequence
  SAMD9L targeting guide sequence portion
accaauuucuauguuacuuaag

SEQ ID NO: 16762 - RNA, 22 nt, Artificial Sequence
  SAMD9L targeting guide sequence portion
accaguuagcagcuauagcuua

SEQ ID NO: 16763 - RNA, 22 nt, Artificial Sequence
  SAMD9L targeting guide sequence portion
accauccuaauucauacccuug

SEQ ID NO: 16764 - RNA, 22 nt, Artificial Sequence
  SAMD9L targeting guide sequence portion
acccacuucuaccuauccaguu

SEQ ID NO: 16765 - RNA, 22 nt, Artificial Sequence
  SAMD9L targeting guide sequence portion
accccaacuuucaccaaguuaa

SEQ ID NO: 16766 - RNA, 22 nt, Artificial Sequence
  SAMD9L targeting guide sequence portion
acccuuguuucuuaggugacuc

SEQ ID NO: 16767 - RNA, 22 nt, Artificial Sequence
  SAMD9L targeting guide sequence portion
accuaagaaacaaggguaugaa

SEQ ID NO: 16768 - RNA, 22 nt, Artificial Sequence
  SAMD9L targeting guide sequence portion
accuauccaguuucauuauuuu

SEQ ID NO: 16769 - RNA, 22 nt, Artificial Sequence
  SAMD9L targeting guide sequence portion
accuuuuagccuuauaauaauu

SEQ ID NO: 16770 - RNA, 22 nt, Artificial Sequence
  SAMD9L targeting guide sequence portion
acggaaaccaauuucuauguua

SEQ ID NO: 16771 - RNA, 22 nt, Artificial Sequence
  SAMD9L targeting guide sequence portion
acuauguaacaaagauagccag

SEQ ID NO: 16772 - RNA, 22 nt, Artificial Sequence
  SAMD9L targeting guide sequence portion
acucuaauuguaauuaugaaau

SEQ ID NO: 16773 - RNA, 22 nt, Artificial Sequence
  SAMD9L targeting guide sequence portion
acucuuaaaacugcuugauacu

SEQ ID NO: 16774 - RNA, 22 nt, Artificial Sequence
  SAMD9L targeting guide sequence portion
acugcucuguuacuauguaaca

SEQ ID NO: 16775 - RNA, 22 nt, Artificial Sequence
  SAMD9L targeting guide sequence portion
acugcuugauacuuacuuuagc

SEQ ID NO: 16776 - RNA, 22 nt, Artificial Sequence
  SAMD9L targeting guide sequence portion
acuggauagguagaaguggguu

SEQ ID NO: 16777 - RNA, 22 nt, Artificial Sequence
  SAMD9L targeting guide sequence portion
acuggugacacaccuuuuagcc

SEQ ID NO: 16778 - RNA, 22 nt, Artificial Sequence
  SAMD9L targeting guide sequence portion
acuuaaaagcagaaucuuaagu

SEQ ID NO: 16779 - RNA, 22 nt, Artificial Sequence
  SAMD9L targeting guide sequence portion
acuuaagauucugcuuuuaagu

SEQ ID NO: 16780 - RNA, 22 nt, Artificial Sequence
  SAMD9L targeting guide sequence portion
acuuacuuuagcuauuuuacca

SEQ ID NO: 16781 - RNA, 22 nt, Artificial Sequence
  SAMD9L targeting guide sequence portion
acuucuaccuauccaguuucau

SEQ ID NO: 16782 - RNA, 22 nt, Artificial Sequence
  SAMD9L targeting guide sequence portion
acuuggugaaaguugggguuuu

SEQ ID NO: 16783 - RNA, 22 nt, Artificial Sequence
  SAMD9L targeting guide sequence portion
acuuuaaaauaaugaaacugga

SEQ ID NO: 16784 - RNA, 22 nt, Artificial Sequence
  SAMD9L targeting guide sequence portion
acuuuagcuauuuuaccauccu

SEQ ID NO: 16785 - RNA, 22 nt, Artificial Sequence
  SAMD9L targeting guide sequence portion
acuuuauuuuuaaaaucacaua

SEQ ID NO: 16786 - RNA, 22 nt, Artificial Sequence
  SAMD9L targeting guide sequence portion
acuuucaccaaguuaagcuaaa

SEQ ID NO: 16787 - RNA, 22 nt, Artificial Sequence
  SAMD9L targeting guide sequence portion
agaaaacagauuauuuaaccaa

SEQ ID NO: 16788 - RNA, 22 nt, Artificial Sequence
  SAMD9L targeting guide sequence portion
agaaacaaggguaugaauuagg

SEQ ID NO: 16789 - RNA, 22 nt, Artificial Sequence
  SAMD9L targeting guide sequence portion
agaaauugguuuccguagcaua

SEQ ID NO: 16790 - RNA, 22 nt, Artificial Sequence
  SAMD9L targeting guide sequence portion
agaagauacauauauauaugua

SEQ ID NO: 16791 - RNA, 22 nt, Artificial Sequence
  SAMD9L targeting guide sequence portion
agaaguggguugaggaacagga

SEQ ID NO: 16792 - RNA, 22 nt, Artificial Sequence
  SAMD9L targeting guide sequence portion
agaaucuuaaguaacauagaaa

SEQ ID NO: 16793 - RNA, 22 nt, Artificial Sequence
  SAMD9L targeting guide sequence portion
agaauuauacuuuauuuuuaaa

SEQ ID NO: 16794 - RNA, 22 nt, Artificial Sequence
  SAMD9L targeting guide sequence portion
agaauuauuauaaggcuaaaag

SEQ ID NO: 16795 - RNA, 22 nt, Artificial Sequence
  SAMD9L targeting guide sequence portion
agacaaagcaauauaauaagua

SEQ ID NO: 16796 - RNA, 22 nt, Artificial Sequence
  SAMD9L targeting guide sequence portion
agacaauuauguauacauuauc

SEQ ID NO: 16797 - RNA, 22 nt, Artificial Sequence
  SAMD9L targeting guide sequence portion
agagcaguugguuaaauaaucu

SEQ ID NO: 16798 - RNA, 22 nt, Artificial Sequence
  SAMD9L targeting guide sequence portion
agagucaccuaagaaacaaggg

SEQ ID NO: 16799 - RNA, 22 nt, Artificial Sequence
  SAMD9L targeting guide sequence portion
agagucagccuuuagcaauauu

SEQ ID NO: 16800 - RNA, 22 nt, Artificial Sequence
  SAMD9L targeting guide sequence portion
agauacauauauauauguauaa

SEQ ID NO: 16801 - RNA, 22 nt, Artificial Sequence
  SAMD9L targeting guide sequence portion
agauagccagcuguggauuccu

SEQ ID NO: 16802 - RNA, 22 nt, Artificial Sequence
  SAMD9L targeting guide sequence portion
agauuauuuaaccaacugcucu

SEQ ID NO: 16803 - RNA, 22 nt, Artificial Sequence
  SAMD9L targeting guide sequence portion
agauucugcuuuuaagucacaa

SEQ ID NO: 16804 - RNA, 22 nt, Artificial Sequence
  SAMD9L targeting guide sequence portion
agcaauauaauaaguauuuuag

SEQ ID NO: 16805 - RNA, 22 nt, Artificial Sequence
  SAMD9L targeting guide sequence portion
agcaauauuauacauauauaua

SEQ ID NO: 16806 - RNA, 22 nt, Artificial Sequence
  SAMD9L targeting guide sequence portion
agcagaaucuuaaguaacauag

SEQ ID NO: 16807 - RNA, 22 nt, Artificial Sequence
  SAMD9L targeting guide sequence portion
agcagcuauagcuuauuucaua

SEQ ID NO: 16808 - RNA, 22 nt, Artificial Sequence
  SAMD9L targeting guide sequence portion
agcaguugguuaaauaaucugu

SEQ ID NO: 16809 - RNA, 22 nt, Artificial Sequence
  SAMD9L targeting guide sequence portion
agcaguuuuaagagucagccuu

SEQ ID NO: 16810 - RNA, 22 nt, Artificial Sequence
  SAMD9L targeting guide sequence portion
agcauauaggaauauugcaaau

SEQ ID NO: 16811 - RNA, 22 nt, Artificial Sequence
  SAMD9L targeting guide sequence portion
agccagcuguggauuccuguuc

SEQ ID NO: 16812 - RNA, 22 nt, Artificial Sequence
  SAMD9L targeting guide sequence portion
agccuuauaauaauucucccuu

SEQ ID NO: 16813 - RNA, 22 nt, Artificial Sequence
  SAMD9L targeting guide sequence portion
agccuuuagcaauauuauacau

SEQ ID NO: 16814 - RNA, 22 nt, Artificial Sequence
  SAMD9L targeting guide sequence portion
agcuaaaagggagaauuauuau

SEQ ID NO: 16815 - RNA, 22 nt, Artificial Sequence
  SAMD9L targeting guide sequence portion
agcuaaaguaaguaucaagcag

SEQ ID NO: 16816 - RNA, 22 nt, Artificial Sequence
  SAMD9L targeting guide sequence portion
agcuauagcugcuaacugguga

SEQ ID NO: 16817 - RNA, 22 nt, Artificial Sequence
  SAMD9L targeting guide sequence portion
agcuauagcuuauuucauaauu

SEQ ID NO: 16818 - RNA, 22 nt, Artificial Sequence
  SAMD9L targeting guide sequence portion
agcuauuuuaccauccuaauuc

SEQ ID NO: 16819 - RNA, 22 nt, Artificial Sequence
  SAMD9L targeting guide sequence portion
agcugcuaacuggugacacacc

SEQ ID NO: 16820 - RNA, 22 nt, Artificial Sequence
  SAMD9L targeting guide sequence portion
agcuggcuaucuuuguuacaua

SEQ ID NO: 16821 - RNA, 22 nt, Artificial Sequence
  SAMD9L targeting guide sequence portion
agcuguggauuccuguuccuca

SEQ ID NO: 16822 - RNA, 22 nt, Artificial Sequence
  SAMD9L targeting guide sequence portion
agcuuaacuuggugaaaguugg

SEQ ID NO: 16823 - RNA, 22 nt, Artificial Sequence
  SAMD9L targeting guide sequence portion
agcuuauuucauaauuacaauu

SEQ ID NO: 16824 - RNA, 22 nt, Artificial Sequence
  SAMD9L targeting guide sequence portion
agcuugaguuccaaaagaaaac

SEQ ID NO: 16825 - RNA, 22 nt, Artificial Sequence
  SAMD9L targeting guide sequence portion
aggaacaggaauccacagcugg

SEQ ID NO: 16826 - RNA, 22 nt, Artificial Sequence
  SAMD9L targeting guide sequence portion
aggaauauugcaaauaaacuuu

SEQ ID NO: 16827 - RNA, 22 nt, Artificial Sequence
  SAMD9L targeting guide sequence portion
aggaauccacagcuggcuaucu

SEQ ID NO: 16828 - RNA, 22 nt, Artificial Sequence
  SAMD9L targeting guide sequence portion
aggaugguaaaauagcuaaagu

SEQ ID NO: 16829 - RNA, 22 nt, Artificial Sequence
  SAMD9L targeting guide sequence portion
aggcuaaaaggugugucaccag

SEQ ID NO: 16830 - RNA, 22 nt, Artificial Sequence
  SAMD9L targeting guide sequence portion
aggcugacucuuaaaacugcuu

SEQ ID NO: 16831 - RNA, 22 nt, Artificial Sequence
  SAMD9L targeting guide sequence portion
agggagaauuauuauaaggcua

SEQ ID NO: 16832 - RNA, 22 nt, Artificial Sequence
  SAMD9L targeting guide sequence portion
aggguaugaauuaggaugguaa

SEQ ID NO: 16833 - RNA, 22 nt, Artificial Sequence
  SAMD9L targeting guide sequence portion
agguagaaguggguugaggaac

SEQ ID NO: 16834 - RNA, 22 nt, Artificial Sequence
  SAMD9L targeting guide sequence portion
aggugacucuaauuguaauuau

SEQ ID NO: 16835 - RNA, 22 nt, Artificial Sequence
  SAMD9L targeting guide sequence portion
aggugugucaccaguuagcagc

SEQ ID NO: 16836 - RNA, 22 nt, Artificial Sequence
  SAMD9L targeting guide sequence portion
aguaacagagcaguugguuaaa

SEQ ID NO: 16837 - RNA, 22 nt, Artificial Sequence
  SAMD9L targeting guide sequence portion
aguaacauagaaauugguuucc

SEQ ID NO: 16838 - RNA, 22 nt, Artificial Sequence
  SAMD9L targeting guide sequence portion
aguaaguaucaagcaguuuuaa

SEQ ID NO: 16839 - RNA, 22 nt, Artificial Sequence
  SAMD9L targeting guide sequence portion
aguauaauucuaaaauacuuau

SEQ ID NO: 16840 - RNA, 22 nt, Artificial Sequence
  SAMD9L targeting guide sequence portion
aguaucaagcaguuuuaagagu

SEQ ID NO: 16841 - RNA, 22 nt, Artificial Sequence
  SAMD9L targeting guide sequence portion
aguauuuuagaauuauacuuua

SEQ ID NO: 16842 - RNA, 22 nt, Artificial Sequence
  SAMD9L targeting guide sequence portion
agucacaaaaccccaacuuuca

SEQ ID NO: 16843 - RNA, 22 nt, Artificial Sequence
  SAMD9L targeting guide sequence portion
agucaccuaagaaacaagggua

SEQ ID NO: 16844 - RNA, 22 nt, Artificial Sequence
  SAMD9L targeting guide sequence portion
agucagccuuuagcaauauuau

SEQ ID NO: 16845 - RNA, 22 nt, Artificial Sequence
  SAMD9L targeting guide sequence portion
aguggguugaggaacaggaauc

SEQ ID NO: 16846 - RNA, 22 nt, Artificial Sequence
  SAMD9L targeting guide sequence portion
aguuaagcuaaaagggagaauu

SEQ ID NO: 16847 - RNA, 22 nt, Artificial Sequence
  SAMD9L targeting guide sequence portion
aguuagcagcuauagcuuauuu

SEQ ID NO: 16848 - RNA, 22 nt, Artificial Sequence
  SAMD9L targeting guide sequence portion
aguuccaaaagaaaacagauua

SEQ ID NO: 16849 - RNA, 22 nt, Artificial Sequence
  SAMD9L targeting guide sequence portion
aguugggguuuugugacuuaaa

SEQ ID NO: 16850 - RNA, 22 nt, Artificial Sequence
  SAMD9L targeting guide sequence portion
aguugguuaaauaaucuguuuu

SEQ ID NO: 16851 - RNA, 22 nt, Artificial Sequence
  SAMD9L targeting guide sequence portion
aguuuauuugcaauauuccuau

SEQ ID NO: 16852 - RNA, 22 nt, Artificial Sequence
  SAMD9L targeting guide sequence portion
aguuucauuauuuuaaaguuua

SEQ ID NO: 16853 - RNA, 22 nt, Artificial Sequence
  SAMD9L targeting guide sequence portion
aguuuuaagagucagccuuuag

SEQ ID NO: 16854 - RNA, 22 nt, Artificial Sequence
  SAMD9L targeting guide sequence portion
auaaacuuuaaaauaaugaaac

SEQ ID NO: 16855 - RNA, 22 nt, Artificial Sequence
  SAMD9L targeting guide sequence portion
auaaaguauaauucuaaaauac

SEQ ID NO: 16856 - RNA, 22 nt, Artificial Sequence
  SAMD9L targeting guide sequence portion
auaagcuauagcugcuaacugg

SEQ ID NO: 16857 - RNA, 22 nt, Artificial Sequence
  SAMD9L targeting guide sequence portion
auaaggcuaaaaggugugucac

SEQ ID NO: 16858 - RNA, 22 nt, Artificial Sequence
  SAMD9L targeting guide sequence portion
auaaguauuuuagaauuauacu

SEQ ID NO: 16859 - RNA, 22 nt, Artificial Sequence
  SAMD9L targeting guide sequence portion
auaauaaguauuuuagaauuau

SEQ ID NO: 16860 - RNA, 22 nt, Artificial Sequence
  SAMD9L targeting guide sequence portion
auaauaauucucccuuuuagcu

SEQ ID NO: 16861 - RNA, 22 nt, Artificial Sequence
  SAMD9L targeting guide sequence portion
auaauauugcuaaaggcugacu

SEQ ID NO: 16862 - RNA, 22 nt, Artificial Sequence
  SAMD9L targeting guide sequence portion
auaaucuguuuucuuuuggaac

SEQ ID NO: 16863 - RNA, 22 nt, Artificial Sequence
  SAMD9L targeting guide sequence portion
auaaugaaacuggauagguaga

SEQ ID NO: 16864 - RNA, 22 nt, Artificial Sequence
  SAMD9L targeting guide sequence portion
auaauguauacauaauugucua

SEQ ID NO: 16865 - RNA, 22 nt, Artificial Sequence
  SAMD9L targeting guide sequence portion
auaauuacaauuagagucaccu

SEQ ID NO: 16866 - RNA, 22 nt, Artificial Sequence
  SAMD9L targeting guide sequence portion
auaauucuaaaauacuuauuau

SEQ ID NO: 16867 - RNA, 22 nt, Artificial Sequence
  SAMD9L targeting guide sequence portion
auaauucucccuuuuagcuuaa

SEQ ID NO: 16868 - RNA, 22 nt, Artificial Sequence
  SAMD9L targeting guide sequence portion
auaauugucuaugugauuuuaa

SEQ ID NO: 16869 - RNA, 22 nt, Artificial Sequence
  SAMD9L targeting guide sequence portion
auacagaagauacauauauaua

SEQ ID NO: 16870 - RNA, 22 nt, Artificial Sequence
  SAMD9L targeting guide sequence portion
auacauaauugucuaugugauu

SEQ ID NO: 16871 - RNA, 22 nt, Artificial Sequence
  SAMD9L targeting guide sequence portion
auacauauauauauguauaaua

SEQ ID NO: 16872 - RNA, 22 nt, Artificial Sequence
  SAMD9L targeting guide sequence portion
auacauauauauauguaucuuc

SEQ ID NO: 16873 - RNA, 22 nt, Artificial Sequence
  SAMD9L targeting guide sequence portion
auacauuaucauacagaagaua

SEQ ID NO: 16874 - RNA, 22 nt, Artificial Sequence
  SAMD9L targeting guide sequence portion
auacccuuguuucuuaggugac

SEQ ID NO: 16875 - RNA, 22 nt, Artificial Sequence
  SAMD9L targeting guide sequence portion
auacuuacuuuagcuauuuuac

SEQ ID NO: 16876 - RNA, 22 nt, Artificial Sequence
  SAMD9L targeting guide sequence portion
auacuuuauuuuuaaaaucaca

SEQ ID NO: 16877 - RNA, 22 nt, Artificial Sequence
  SAMD9L targeting guide sequence portion
auagaaauugguuuccguagca

SEQ ID NO: 16878 - RNA, 22 nt, Artificial Sequence
  SAMD9L targeting guide sequence portion
auagacaauuauguauacauua

SEQ ID NO: 16879 - RNA, 22 nt, Artificial Sequence
  SAMD9L targeting guide sequence portion
auagccagcuguggauuccugu

SEQ ID NO: 16880 - RNA, 22 nt, Artificial Sequence
  SAMD9L targeting guide sequence portion
auagcuaaaguaaguaucaagc

SEQ ID NO: 16881 - RNA, 22 nt, Artificial Sequence
  SAMD9L targeting guide sequence portion
auagcugcuaacuggugacaca

SEQ ID NO: 16882 - RNA, 22 nt, Artificial Sequence
  SAMD9L targeting guide sequence portion
auagcuuauuucauaauuacaa

SEQ ID NO: 16883 - RNA, 22 nt, Artificial Sequence
  SAMD9L targeting guide sequence portion
auaggaauauugcaaauaaacu

SEQ ID NO: 16884 - RNA, 22 nt, Artificial Sequence
  SAMD9L targeting guide sequence portion
auagguagaaguggguugagga

SEQ ID NO: 16885 - RNA, 22 nt, Artificial Sequence
  SAMD9L targeting guide sequence portion
auaguaacagagcaguugguua

SEQ ID NO: 16886 - RNA, 22 nt, Artificial Sequence
  SAMD9L targeting guide sequence portion
auauaauaaguauuuuagaauu

SEQ ID NO: 16887 - RNA, 22 nt, Artificial Sequence
  SAMD9L targeting guide sequence portion
auauaggaauauugcaaauaaa

SEQ ID NO: 16888 - RNA, 22 nt, Artificial Sequence
  SAMD9L targeting guide sequence portion
auauauauauguauaauauugc

SEQ ID NO: 16889 - RNA, 22 nt, Artificial Sequence
  SAMD9L targeting guide sequence portion
auauauauauguaucuucugua

SEQ ID NO: 16890 - RNA, 22 nt, Artificial Sequence
  SAMD9L targeting guide sequence portion
auauauauguauaauauugcua

SEQ ID NO: 16891 - RNA, 22 nt, Artificial Sequence
  SAMD9L targeting guide sequence portion
auauauauguaucuucuguaug

SEQ ID NO: 16892 - RNA, 22 nt, Artificial Sequence
  SAMD9L targeting guide sequence portion
auauauguauaauauugcuaaa

SEQ ID NO: 16893 - RNA, 22 nt, Artificial Sequence
  SAMD9L targeting guide sequence portion
auauauguaucuucuguaugau

SEQ ID NO: 16894 - RNA, 22 nt, Artificial Sequence
  SAMD9L targeting guide sequence portion
auaugcuacggaaaccaauuuc

SEQ ID NO: 16895 - RNA, 22 nt, Artificial Sequence
  SAMD9L targeting guide sequence portion
auauguauaauauugcuaaagg

SEQ ID NO: 16896 - RNA, 22 nt, Artificial Sequence
  SAMD9L targeting guide sequence portion
auauguaucuucuguaugauaa

SEQ ID NO: 16897 - RNA, 22 nt, Artificial Sequence
  SAMD9L targeting guide sequence portion
auauuauacauauauauaugua

SEQ ID NO: 16898 - RNA, 22 nt, Artificial Sequence
  SAMD9L targeting guide sequence portion
auauuccuauaugcuacggaaa

SEQ ID NO: 16899 - RNA, 22 nt, Artificial Sequence
  SAMD9L targeting guide sequence portion
auauugcaaauaaacuuuaaaa

SEQ ID NO: 16900 - RNA, 22 nt, Artificial Sequence
  SAMD9L targeting guide sequence portion
auauugcuaaaggcugacucuu

SEQ ID NO: 16901 - RNA, 22 nt, Artificial Sequence
  SAMD9L targeting guide sequence portion
aucaagcaguuuuaagagucag

SEQ ID NO: 16902 - RNA, 22 nt, Artificial Sequence
  SAMD9L targeting guide sequence portion
aucacauagacaauuauguaua

SEQ ID NO: 16903 - RNA, 22 nt, Artificial Sequence
  SAMD9L targeting guide sequence portion
aucauacagaagauacauauau

SEQ ID NO: 16904 - RNA, 22 nt, Artificial Sequence
  SAMD9L targeting guide sequence portion
auccacagcuggcuaucuuugu

SEQ ID NO: 16905 - RNA, 22 nt, Artificial Sequence
  SAMD9L targeting guide sequence portion
auccaguuucauuauuuuaaag

SEQ ID NO: 16906 - RNA, 22 nt, Artificial Sequence
  SAMD9L targeting guide sequence portion
auccuaauucauacccuuguuu

SEQ ID NO: 16907 - RNA, 22 nt, Artificial Sequence
  SAMD9L targeting guide sequence portion
aucuguuuucuuuuggaacuca

SEQ ID NO: 16908 - RNA, 22 nt, Artificial Sequence
  SAMD9L targeting guide sequence portion
aucuuaaguaacauagaaauug

SEQ ID NO: 16909 - RNA, 22 nt, Artificial Sequence
  SAMD9L targeting guide sequence portion
aucuucuguaugauaauguaua

SEQ ID NO: 16910 - RNA, 22 nt, Artificial Sequence
  SAMD9L targeting guide sequence portion
aucuuuguuacauaguaacaga

SEQ ID NO: 16911 - RNA, 22 nt, Artificial Sequence
  SAMD9L targeting guide sequence portion
augaaacuggauagguagaagu

SEQ ID NO: 16912 - RNA, 22 nt, Artificial Sequence
  SAMD9L targeting guide sequence portion
augaaauaagcuauagcugcua

SEQ ID NO: 16913 - RNA, 22 nt, Artificial Sequence
  SAMD9L targeting guide sequence portion
augaauuaggaugguaaaauag

SEQ ID NO: 16914 - RNA, 22 nt, Artificial Sequence
  SAMD9L targeting guide sequence portion
augauaauguauacauaauugu

SEQ ID NO: 16915 - RNA, 22 nt, Artificial Sequence
  SAMD9L targeting guide sequence portion
augcuacggaaaccaauuucua

SEQ ID NO: 16916 - RNA, 22 nt, Artificial Sequence
  SAMD9L targeting guide sequence portion
augguaaaauagcuaaaguaag

SEQ ID NO: 16917 - RNA, 22 nt, Artificial Sequence
  SAMD9L targeting guide sequence portion
auguaacaaagauagccagcug

SEQ ID NO: 16918 - RNA, 22 nt, Artificial Sequence
  SAMD9L targeting guide sequence portion
auguauaauauugcuaaaggcu

SEQ ID NO: 16919 - RNA, 22 nt, Artificial Sequence
  SAMD9L targeting guide sequence portion
auguauacauaauugucuaugu

SEQ ID NO: 16920 - RNA, 22 nt, Artificial Sequence
  SAMD9L targeting guide sequence portion
auguauacauuaucauacagaa

SEQ ID NO: 16921 - RNA, 22 nt, Artificial Sequence
  SAMD9L targeting guide sequence portion
auguaucuucuguaugauaaug

SEQ ID NO: 16922 - RNA, 22 nt, Artificial Sequence
  SAMD9L targeting guide sequence portion
augugauuuuaaaaauaaagua

SEQ ID NO: 16923 - RNA, 22 nt, Artificial Sequence
  SAMD9L targeting guide sequence portion
auguuacuuaagauucugcuuu

SEQ ID NO: 16924 - RNA, 22 nt, Artificial Sequence
  SAMD9L targeting guide sequence portion
auuacaauuagagucaccuaag

SEQ ID NO: 16925 - RNA, 22 nt, Artificial Sequence
  SAMD9L targeting guide sequence portion
auuagagucaccuaagaaacaa

SEQ ID NO: 16926 - RNA, 22 nt, Artificial Sequence
  SAMD9L targeting guide sequence portion
auuaggaugguaaaauagcuaa

SEQ ID NO: 16927 - RNA, 22 nt, Artificial Sequence
  SAMD9L targeting guide sequence portion
auuauaaggcuaaaaggugugu

SEQ ID NO: 16928 - RNA, 22 nt, Artificial Sequence
  SAMD9L targeting guide sequence portion
auuauacauauauauauguauc

SEQ ID NO: 16929 - RNA, 22 nt, Artificial Sequence
  SAMD9L targeting guide sequence portion
auuauacuuuauuuuuaaaauc

SEQ ID NO: 16930 - RNA, 22 nt, Artificial Sequence
  SAMD9L targeting guide sequence portion
auuaucauacagaagauacaua

SEQ ID NO: 16931 - RNA, 22 nt, Artificial Sequence
  SAMD9L targeting guide sequence portion
auuaugaaauaagcuauagcug

SEQ ID NO: 16932 - RNA, 22 nt, Artificial Sequence
  SAMD9L targeting guide sequence portion
auuauguauacauuaucauaca

SEQ ID NO: 16933 - RNA, 22 nt, Artificial Sequence
  SAMD9L targeting guide sequence portion
auuauuauaaggcuaaaaggug

SEQ ID NO: 16934 - RNA, 22 nt, Artificial Sequence
  SAMD9L targeting guide sequence portion
auuauuuaaccaacugcucugu

SEQ ID NO: 16935 - RNA, 22 nt, Artificial Sequence
  SAMD9L targeting guide sequence portion
auuauuuuaaaguuuauuugca

SEQ ID NO: 16936 - RNA, 22 nt, Artificial Sequence
  SAMD9L targeting guide sequence portion
auucauacccuuguuucuuagg

SEQ ID NO: 16937 - RNA, 22 nt, Artificial Sequence
  SAMD9L targeting guide sequence portion
auuccuauaugcuacggaaacc

SEQ ID NO: 16938 - RNA, 22 nt, Artificial Sequence
  SAMD9L targeting guide sequence portion
auuccuguuccucaacccacuu

SEQ ID NO: 16939 - RNA, 22 nt, Artificial Sequence
  SAMD9L targeting guide sequence portion
auucuaaaauacuuauuauauu

SEQ ID NO: 16940 - RNA, 22 nt, Artificial Sequence
  SAMD9L targeting guide sequence portion
auucucccuuuuagcuuaacuu

SEQ ID NO: 16941 - RNA, 22 nt, Artificial Sequence
  SAMD9L targeting guide sequence portion
auucugcuuuuaagucacaaaa

SEQ ID NO: 16942 - RNA, 22 nt, Artificial Sequence
  SAMD9L targeting guide sequence portion
auugcaaauaaacuuuaaaaua

SEQ ID NO: 16943 - RNA, 22 nt, Artificial Sequence
  SAMD9L targeting guide sequence portion
auugcuaaaggcugacucuuaa

SEQ ID NO: 16944 - RNA, 22 nt, Artificial Sequence
  SAMD9L targeting guide sequence portion
auugguuuccguagcauauagg

SEQ ID NO: 16945 - RNA, 22 nt, Artificial Sequence
  SAMD9L targeting guide sequence portion
auuguaauuaugaaauaagcua

SEQ ID NO: 16946 - RNA, 22 nt, Artificial Sequence
  SAMD9L targeting guide sequence portion
auugucuaugugauuuuaaaaa

SEQ ID NO: 16947 - RNA, 22 nt, Artificial Sequence
  SAMD9L targeting guide sequence portion
auuuaaccaacugcucuguuac

SEQ ID NO: 16948 - RNA, 22 nt, Artificial Sequence
  SAMD9L targeting guide sequence portion
auuucauaauuacaauuagagu

SEQ ID NO: 16949 - RNA, 22 nt, Artificial Sequence
  SAMD9L targeting guide sequence portion
auuucuauguuacuuaagauuc

SEQ ID NO: 16950 - RNA, 22 nt, Artificial Sequence
  SAMD9L targeting guide sequence portion
auuugcaauauuccuauaugcu

SEQ ID NO: 16951 - RNA, 22 nt, Artificial Sequence
  SAMD9L targeting guide sequence portion
auuuuaaaaauaaaguauaauu

SEQ ID NO: 16952 - RNA, 22 nt, Artificial Sequence
  SAMD9L targeting guide sequence portion
auuuuaaaguuuauuugcaaua

SEQ ID NO: 16953 - RNA, 22 nt, Artificial Sequence
  SAMD9L targeting guide sequence portion
auuuuaccauccuaauucauac

SEQ ID NO: 16954 - RNA, 22 nt, Artificial Sequence
  SAMD9L targeting guide sequence portion
auuuuagaauuauacuuuauuu

SEQ ID NO: 16955 - RNA, 22 nt, Artificial Sequence
  SAMD9L targeting guide sequence portion
auuuuuaaaaucacauagacaa

SEQ ID NO: 16956 - RNA, 22 nt, Artificial Sequence
  SAMD9L targeting guide sequence portion
caaaaccccaacuuucaccaag

SEQ ID NO: 16957 - RNA, 22 nt, Artificial Sequence
  SAMD9L targeting guide sequence portion
caaaagaaaacagauuauuuaa

SEQ ID NO: 16958 - RNA, 22 nt, Artificial Sequence
  SAMD9L targeting guide sequence portion
caaagauagccagcuguggauu

SEQ ID NO: 16959 - RNA, 22 nt, Artificial Sequence
  SAMD9L targeting guide sequence portion
caaagcaauauaauaaguauuu

SEQ ID NO: 16960 - RNA, 22 nt, Artificial Sequence
  SAMD9L targeting guide sequence portion
caaauaaacuuuaaaauaauga

SEQ ID NO: 16961 - RNA, 22 nt, Artificial Sequence
  SAMD9L targeting guide sequence portion
caacccacuucuaccuauccag

SEQ ID NO: 16962 - RNA, 22 nt, Artificial Sequence
  SAMD9L targeting guide sequence portion
caacugcucuguuacuauguaa

SEQ ID NO: 16963 - RNA, 22 nt, Artificial Sequence
  SAMD9L targeting guide sequence portion
caacuuucaccaaguuaagcua

SEQ ID NO: 16964 - RNA, 22 nt, Artificial Sequence
  SAMD9L targeting guide sequence portion
caagcaguuuuaagagucagcc

SEQ ID NO: 16965 - RNA, 22 nt, Artificial Sequence
  SAMD9L targeting guide sequence portion
caaggguaugaauuaggauggu

SEQ ID NO: 16966 - RNA, 22 nt, Artificial Sequence
  SAMD9L targeting guide sequence portion
caaguuaagcuaaaagggagaa

SEQ ID NO: 16967 - RNA, 22 nt, Artificial Sequence
  SAMD9L targeting guide sequence portion
caauauaauaaguauuuuagaa

SEQ ID NO: 16968 - RNA, 22 nt, Artificial Sequence
  SAMD9L targeting guide sequence portion
caauauuauacauauauauaug

SEQ ID NO: 16969 - RNA, 22 nt, Artificial Sequence
  SAMD9L targeting guide sequence portion
caauauuccuauaugcuacgga

SEQ ID NO: 16970 - RNA, 22 nt, Artificial Sequence
  SAMD9L targeting guide sequence portion
caauuagagucaccuaagaaac

SEQ ID NO: 16971 - RNA, 22 nt, Artificial Sequence
  SAMD9L targeting guide sequence portion
caauuauguauacauuaucaua

SEQ ID NO: 16972 - RNA, 22 nt, Artificial Sequence
  SAMD9L targeting guide sequence portion
caauuucuauguuacuuaagau

SEQ ID NO: 16973 - RNA, 22 nt, Artificial Sequence
  SAMD9L targeting guide sequence portion
cacaaaaccccaacuuucacca

SEQ ID NO: 16974 - RNA, 22 nt, Artificial Sequence
  SAMD9L targeting guide sequence portion
cacaccuuuuagccuuauaaua

SEQ ID NO: 16975 - RNA, 22 nt, Artificial Sequence
  SAMD9L targeting guide sequence portion
cacagcuggcuaucuuuguuac

SEQ ID NO: 16976 - RNA, 22 nt, Artificial Sequence
  SAMD9L targeting guide sequence portion
cacauagacaauuauguauaca

SEQ ID NO: 16977 - RNA, 22 nt, Artificial Sequence
  SAMD9L targeting guide sequence portion
caccaaguuaagcuaaaaggga

SEQ ID NO: 16978 - RNA, 22 nt, Artificial Sequence
  SAMD9L targeting guide sequence portion
caccaguuagcagcuauagcuu

SEQ ID NO: 16979 - RNA, 22 nt, Artificial Sequence
  SAMD9L targeting guide sequence portion
caccuaagaaacaaggguauga

SEQ ID NO: 16980 - RNA, 22 nt, Artificial Sequence
  SAMD9L targeting guide sequence portion
caccuuuuagccuuauaauaau

SEQ ID NO: 16981 - RNA, 22 nt, Artificial Sequence
  SAMD9L targeting guide sequence portion
cacuucuaccuauccaguuuca

SEQ ID NO: 16982 - RNA, 22 nt, Artificial Sequence
  SAMD9L targeting guide sequence portion
cagaagauacauauauauaugu

SEQ ID NO: 16983 - RNA, 22 nt, Artificial Sequence
  SAMD9L targeting guide sequence portion
cagaaucuuaaguaacauagaa

SEQ ID NO: 16984 - RNA, 22 nt, Artificial Sequence
  SAMD9L targeting guide sequence portion
cagagcaguugguuaaauaauc

SEQ ID NO: 16985 - RNA, 22 nt, Artificial Sequence
  SAMD9L targeting guide sequence portion
cagauuauuuaaccaacugcuc

SEQ ID NO: 16986 - RNA, 22 nt, Artificial Sequence
  SAMD9L targeting guide sequence portion
cagccuuuagcaauauuauaca

SEQ ID NO: 16987 - RNA, 22 nt, Artificial Sequence
  SAMD9L targeting guide sequence portion
cagcuauagcuuauuucauaau

SEQ ID NO: 16988 - RNA, 22 nt, Artificial Sequence
  SAMD9L targeting guide sequence portion
cagcuggcuaucuuuguuacau

SEQ ID NO: 16989 - RNA, 22 nt, Artificial Sequence
  SAMD9L targeting guide sequence portion
cagcuguggauuccuguuccuc

SEQ ID NO: 16990 - RNA, 22 nt, Artificial Sequence
  SAMD9L targeting guide sequence portion
cagcuugaguuccaaaagaaaa

SEQ ID NO: 16991 - RNA, 22 nt, Artificial Sequence
  SAMD9L targeting guide sequence portion
caggaauccacagcuggcuauc

SEQ ID NO: 16992 - RNA, 22 nt, Artificial Sequence
  SAMD9L targeting guide sequence portion
caguuagcagcuauagcuuauu

SEQ ID NO: 16993 - RNA, 22 nt, Artificial Sequence
  SAMD9L targeting guide sequence portion
caguugguuaaauaaucuguuu

SEQ ID NO: 16994 - RNA, 22 nt, Artificial Sequence
  SAMD9L targeting guide sequence portion
caguuucauuauuuuaaaguuu

SEQ ID NO: 16995 - RNA, 22 nt, Artificial Sequence
  SAMD9L targeting guide sequence portion
caguuuuaagagucagccuuua

SEQ ID NO: 16996 - RNA, 22 nt, Artificial Sequence
  SAMD9L targeting guide sequence portion
cauaauuacaauuagagucacc

SEQ ID NO: 16997 - RNA, 22 nt, Artificial Sequence
  SAMD9L targeting guide sequence portion
cauaauugucuaugugauuuua

SEQ ID NO: 16998 - RNA, 22 nt, Artificial Sequence
  SAMD9L targeting guide sequence portion
cauacagaagauacauauauau

SEQ ID NO: 16999 - RNA, 22 nt, Artificial Sequence
  SAMD9L targeting guide sequence portion
cauacccuuguuucuuagguga

SEQ ID NO: 17000 - RNA, 22 nt, Artificial Sequence
  SAMD9L targeting guide sequence portion
cauagaaauugguuuccguagc

SEQ ID NO: 17001 - RNA, 22 nt, Artificial Sequence
  SAMD9L targeting guide sequence portion
cauagacaauuauguauacauu

SEQ ID NO: 17002 - RNA, 22 nt, Artificial Sequence
  SAMD9L targeting guide sequence portion
cauaguaacagagcaguugguu

SEQ ID NO: 17003 - RNA, 22 nt, Artificial Sequence
  SAMD9L targeting guide sequence portion
cauauaggaauauugcaaauaa

SEQ ID NO: 17004 - RNA, 22 nt, Artificial Sequence
  SAMD9L targeting guide sequence portion
cauauauauauguauaauauug

SEQ ID NO: 17005 - RNA, 22 nt, Artificial Sequence
  SAMD9L targeting guide sequence portion
cauauauauauguaucuucugu

SEQ ID NO: 17006 - RNA, 22 nt, Artificial Sequence
  SAMD9L targeting guide sequence portion
cauccuaauucauacccuuguu

SEQ ID NO: 17007 - RNA, 22 nt, Artificial Sequence
  SAMD9L targeting guide sequence portion
cauuaucauacagaagauacau

SEQ ID NO: 17008 - RNA, 22 nt, Artificial Sequence
  SAMD9L targeting guide sequence portion
cauuauuuuaaaguuuauuugc

SEQ ID NO: 17009 - RNA, 22 nt, Artificial Sequence
  SAMD9L targeting guide sequence portion
ccaaaagaaaacagauuauuua

SEQ ID NO: 17010 - RNA, 22 nt, Artificial Sequence
  SAMD9L targeting guide sequence portion
ccaacugcucuguuacuaugua

SEQ ID NO: 17011 - RNA, 22 nt, Artificial Sequence
  SAMD9L targeting guide sequence portion
ccaacuuucaccaaguuaagcu

SEQ ID NO: 17012 - RNA, 22 nt, Artificial Sequence
  SAMD9L targeting guide sequence portion
ccaaguuaagcuaaaagggaga

SEQ ID NO: 17013 - RNA, 22 nt, Artificial Sequence
  SAMD9L targeting guide sequence portion
ccaauuucuauguuacuuaaga

SEQ ID NO: 17014 - RNA, 22 nt, Artificial Sequence
  SAMD9L targeting guide sequence portion
ccacagcuggcuaucuuuguua

SEQ ID NO: 17015 - RNA, 22 nt, Artificial Sequence
  SAMD9L targeting guide sequence portion
ccacuucuaccuauccaguuuc

SEQ ID NO: 17016 - RNA, 22 nt, Artificial Sequence
  SAMD9L targeting guide sequence portion
ccagcuguggauuccuguuccu

SEQ ID NO: 17017 - RNA, 22 nt, Artificial Sequence
  SAMD9L targeting guide sequence portion
ccaguuagcagcuauagcuuau

SEQ ID NO: 17018 - RNA, 22 nt, Artificial Sequence
  SAMD9L targeting guide sequence portion
ccaguuucauuauuuuaaaguu

SEQ ID NO: 17019 - RNA, 22 nt, Artificial Sequence
  SAMD9L targeting guide sequence portion
ccauccuaauucauacccuugu

SEQ ID NO: 17020 - RNA, 22 nt, Artificial Sequence
  SAMD9L targeting guide sequence portion
cccaacuuucaccaaguuaagc

SEQ ID NO: 17021 - RNA, 22 nt, Artificial Sequence
  SAMD9L targeting guide sequence portion
cccacuucuaccuauccaguuu

SEQ ID NO: 17022 - RNA, 22 nt, Artificial Sequence
  SAMD9L targeting guide sequence portion
ccccaacuuucaccaaguuaag

SEQ ID NO: 17023 - RNA, 22 nt, Artificial Sequence
  SAMD9L targeting guide sequence portion
cccuuguuucuuaggugacucu

SEQ ID NO: 17024 - RNA, 22 nt, Artificial Sequence
  SAMD9L targeting guide sequence portion
cccuuuuagcuuaacuugguga

SEQ ID NO: 17025 - RNA, 22 nt, Artificial Sequence
  SAMD9L targeting guide sequence portion
ccguagcauauaggaauauugc

SEQ ID NO: 17026 - RNA, 22 nt, Artificial Sequence
  SAMD9L targeting guide sequence portion
ccuaagaaacaaggguaugaau

SEQ ID NO: 17027 - RNA, 22 nt, Artificial Sequence
  SAMD9L targeting guide sequence portion
ccuaauucauacccuuguuucu

SEQ ID NO: 17028 - RNA, 22 nt, Artificial Sequence
  SAMD9L targeting guide sequence portion
ccuauaugcuacggaaaccaau

SEQ ID NO: 17029 - RNA, 22 nt, Artificial Sequence
  SAMD9L targeting guide sequence portion
ccuauccaguuucauuauuuua

SEQ ID NO: 17030 - RNA, 22 nt, Artificial Sequence
  SAMD9L targeting guide sequence portion
ccucaacccacuucuaccuauc

SEQ ID NO: 17031 - RNA, 22 nt, Artificial Sequence
  SAMD9L targeting guide sequence portion
ccuguuccucaacccacuucua

SEQ ID NO: 17032 - RNA, 22 nt, Artificial Sequence
  SAMD9L targeting guide sequence portion
ccuuauaauaauucucccuuuu

SEQ ID NO: 17033 - RNA, 22 nt, Artificial Sequence
  SAMD9L targeting guide sequence portion
ccuuguuucuuaggugacucua

SEQ ID NO: 17034 - RNA, 22 nt, Artificial Sequence
  SAMD9L targeting guide sequence portion
ccuuuagcaauauuauacauau

SEQ ID NO: 17035 - RNA, 22 nt, Artificial Sequence
  SAMD9L targeting guide sequence portion
ccuuuuagccuuauaauaauuc

SEQ ID NO: 17036 - RNA, 22 nt, Artificial Sequence
  SAMD9L targeting guide sequence portion
ccuuuuagcuuaacuuggugaa

SEQ ID NO: 17037 - RNA, 22 nt, Artificial Sequence
  SAMD9L targeting guide sequence portion
cggaaaccaauuucuauguuac

SEQ ID NO: 17038 - RNA, 22 nt, Artificial Sequence
  SAMD9L targeting guide sequence portion
cguagcauauaggaauauugca

SEQ ID NO: 17039 - RNA, 22 nt, Artificial Sequence
  SAMD9L targeting guide sequence portion
cuaaaagggagaauuauuauaa

SEQ ID NO: 17040 - RNA, 22 nt, Artificial Sequence
  SAMD9L targeting guide sequence portion
cuaaaaggugugucaccaguua

SEQ ID NO: 17041 - RNA, 22 nt, Artificial Sequence
  SAMD9L targeting guide sequence portion
cuaaaauacuuauuauauugcu

SEQ ID NO: 17042 - RNA, 22 nt, Artificial Sequence
  SAMD9L targeting guide sequence portion
cuaaaggcugacucuuaaaacu

SEQ ID NO: 17043 - RNA, 22 nt, Artificial Sequence
  SAMD9L targeting guide sequence portion
cuaaaguaaguaucaagcaguu

SEQ ID NO: 17044 - RNA, 22 nt, Artificial Sequence
  SAMD9L targeting guide sequence portion
cuaacuggugacacaccuuuua

SEQ ID NO: 17045 - RNA, 22 nt, Artificial Sequence
  SAMD9L targeting guide sequence portion
cuaagaaacaaggguaugaauu

SEQ ID NO: 17046 - RNA, 22 nt, Artificial Sequence
  SAMD9L targeting guide sequence portion
cuaauucauacccuuguuucuu

SEQ ID NO: 17047 - RNA, 22 nt, Artificial Sequence
  SAMD9L targeting guide sequence portion
cuaauuguaauuaugaaauaag

SEQ ID NO: 17048 - RNA, 22 nt, Artificial Sequence
  SAMD9L targeting guide sequence portion
cuaccuauccaguuucauuauu

SEQ ID NO: 17049 - RNA, 22 nt, Artificial Sequence
  SAMD9L targeting guide sequence portion
cuacggaaaccaauuucuaugu

SEQ ID NO: 17050 - RNA, 22 nt, Artificial Sequence
  SAMD9L targeting guide sequence portion
cuauagcugcuaacuggugaca

SEQ ID NO: 17051 - RNA, 22 nt, Artificial Sequence
  SAMD9L targeting guide sequence portion
cuauagcuuauuucauaauuac

SEQ ID NO: 17052 - RNA, 22 nt, Artificial Sequence
  SAMD9L targeting guide sequence portion
cuauaugcuacggaaaccaauu

SEQ ID NO: 17053 - RNA, 22 nt, Artificial Sequence
  SAMD9L targeting guide sequence portion
cuauccaguuucauuauuuuaa

SEQ ID NO: 17054 - RNA, 22 nt, Artificial Sequence
  SAMD9L targeting guide sequence portion
cuaucuuuguuacauaguaaca

SEQ ID NO: 17055 - RNA, 22 nt, Artificial Sequence
  SAMD9L targeting guide sequence portion
cuauguaacaaagauagccagc

SEQ ID NO: 17056 - RNA, 22 nt, Artificial Sequence
  SAMD9L targeting guide sequence portion
cuaugugauuuuaaaaauaaag

SEQ ID NO: 17057 - RNA, 22 nt, Artificial Sequence
  SAMD9L targeting guide sequence portion
cuauguuacuuaagauucugcu

SEQ ID NO: 17058 - RNA, 22 nt, Artificial Sequence
  SAMD9L targeting guide sequence portion
cuauuuuaccauccuaauucau

SEQ ID NO: 17059 - RNA, 22 nt, Artificial Sequence
  SAMD9L targeting guide sequence portion
cucaacccacuucuaccuaucc

SEQ ID NO: 17060 - RNA, 22 nt, Artificial Sequence
  SAMD9L targeting guide sequence portion
cucccuuuuagcuuaacuuggu

SEQ ID NO: 17061 - RNA, 22 nt, Artificial Sequence
  SAMD9L targeting guide sequence portion
cucuaauuguaauuaugaaaua

SEQ ID NO: 17062 - RNA, 22 nt, Artificial Sequence
  SAMD9L targeting guide sequence portion
cucuguuacuauguaacaaaga

SEQ ID NO: 17063 - RNA, 22 nt, Artificial Sequence
  SAMD9L targeting guide sequence portion
cucuuaaaacugcuugauacuu

SEQ ID NO: 17064 - RNA, 22 nt, Artificial Sequence
  SAMD9L targeting guide sequence portion
cugacucuuaaaacugcuugau

SEQ ID NO: 17065 - RNA, 22 nt, Artificial Sequence
  SAMD9L targeting guide sequence portion
cugagacaaagcaauauaauaa

SEQ ID NO: 17066 - RNA, 22 nt, Artificial Sequence
  SAMD9L targeting guide sequence portion
cugcuaacuggugacacaccuu

SEQ ID NO: 17067 - RNA, 22 nt, Artificial Sequence
  SAMD9L targeting guide sequence portion
cugcucuguuacuauguaacaa

SEQ ID NO: 17068 - RNA, 22 nt, Artificial Sequence
  SAMD9L targeting guide sequence portion
cugcuugauacuuacuuuagcu

SEQ ID NO: 17069 - RNA, 22 nt, Artificial Sequence
  SAMD9L targeting guide sequence portion
cugcuuuuaagucacaaaaccc

SEQ ID NO: 17070 - RNA, 22 nt, Artificial Sequence
  SAMD9L targeting guide sequence portion
cuggauagguagaaguggguug

SEQ ID NO: 17071 - RNA, 22 nt, Artificial Sequence
  SAMD9L targeting guide sequence portion
cuggcuaucuuuguuacauagu

SEQ ID NO: 17072 - RNA, 22 nt, Artificial Sequence
  SAMD9L targeting guide sequence portion
cuggugacacaccuuuuagccu

SEQ ID NO: 17073 - RNA, 22 nt, Artificial Sequence
  SAMD9L targeting guide sequence portion
cuguaugauaauguauacauaa

SEQ ID NO: 17074 - RNA, 22 nt, Artificial Sequence
  SAMD9L targeting guide sequence portion
cuguggauuccuguuccucaac

SEQ ID NO: 17075 - RNA, 22 nt, Artificial Sequence
  SAMD9L targeting guide sequence portion
cuguuacuauguaacaaagaua

SEQ ID NO: 17076 - RNA, 22 nt, Artificial Sequence
  SAMD9L targeting guide sequence portion
cuguuccucaacccacuucuac

SEQ ID NO: 17077 - RNA, 22 nt, Artificial Sequence
  SAMD9L targeting guide sequence portion
cuuaaaacugcuugauacuuac

SEQ ID NO: 17078 - RNA, 22 nt, Artificial Sequence
  SAMD9L targeting guide sequence portion
cuuaaaagcagaaucuuaagua

SEQ ID NO: 17079 - RNA, 22 nt, Artificial Sequence
  SAMD9L targeting guide sequence portion
cuuaacuuggugaaaguugggg

SEQ ID NO: 17080 - RNA, 22 nt, Artificial Sequence
  SAMD9L targeting guide sequence portion
cuuaagauucugcuuuuaaguc

SEQ ID NO: 17081 - RNA, 22 nt, Artificial Sequence
  SAMD9L targeting guide sequence portion
cuuaaguaacauagaaauuggu

SEQ ID NO: 17082 - RNA, 22 nt, Artificial Sequence
  SAMD9L targeting guide sequence portion
cuuacuuuagcuauuuuaccau

SEQ ID NO: 17083 - RNA, 22 nt, Artificial Sequence
  SAMD9L targeting guide sequence portion
cuuaggugacucuaauuguaau

SEQ ID NO: 17084 - RNA, 22 nt, Artificial Sequence
  SAMD9L targeting guide sequence portion
cuuauaauaauucucccuuuua

SEQ ID NO: 17085 - RNA, 22 nt, Artificial Sequence
  SAMD9L targeting guide sequence portion
cuuauuucauaauuacaauuag

SEQ ID NO: 17086 - RNA, 22 nt, Artificial Sequence
  SAMD9L targeting guide sequence portion
cuucuaccuauccaguuucauu

SEQ ID NO: 17087 - RNA, 22 nt, Artificial Sequence
  SAMD9L targeting guide sequence portion
cuucuguaugauaauguauaca

SEQ ID NO: 17088 - RNA, 22 nt, Artificial Sequence
  SAMD9L targeting guide sequence portion
cuugaguuccaaaagaaaacag

SEQ ID NO: 17089 - RNA, 22 nt, Artificial Sequence
  SAMD9L targeting guide sequence portion
cuugauacuuacuuuagcuauu

SEQ ID NO: 17090 - RNA, 22 nt, Artificial Sequence
  SAMD9L targeting guide sequence portion
cuuggugaaaguugggguuuug

SEQ ID NO: 17091 - RNA, 22 nt, Artificial Sequence
  SAMD9L targeting guide sequence portion
cuuguuucuuaggugacucuaa

SEQ ID NO: 17092 - RNA, 22 nt, Artificial Sequence
  SAMD9L targeting guide sequence portion
cuuuaaaauaaugaaacuggau

SEQ ID NO: 17093 - RNA, 22 nt, Artificial Sequence
  SAMD9L targeting guide sequence portion
cuuuagcaauauuauacauaua

SEQ ID NO: 17094 - RNA, 22 nt, Artificial Sequence
  SAMD9L targeting guide sequence portion
cuuuagcuauuuuaccauccua

SEQ ID NO: 17095 - RNA, 22 nt, Artificial Sequence
  SAMD9L targeting guide sequence portion
cuuuauuuuuaaaaucacauag

SEQ ID NO: 17096 - RNA, 22 nt, Artificial Sequence
  SAMD9L targeting guide sequence portion
cuuucaccaaguuaagcuaaaa

SEQ ID NO: 17097 - RNA, 22 nt, Artificial Sequence
  SAMD9L targeting guide sequence portion
cuuuguuacauaguaacagagc

SEQ ID NO: 17098 - RNA, 22 nt, Artificial Sequence
  SAMD9L targeting guide sequence portion
cuuuuaagucacaaaaccccaa

SEQ ID NO: 17099 - RNA, 22 nt, Artificial Sequence
  SAMD9L targeting guide sequence portion
cuuuuagccuuauaauaauucu

SEQ ID NO: 17100 - RNA, 22 nt, Artificial Sequence
  SAMD9L targeting guide sequence portion
cuuuuagcuuaacuuggugaaa

SEQ ID NO: 17101 - RNA, 22 nt, Artificial Sequence
  SAMD9L targeting guide sequence portion
gaaaacagauuauuuaaccaac

SEQ ID NO: 17102 - RNA, 22 nt, Artificial Sequence
  SAMD9L targeting guide sequence portion
gaaacaaggguaugaauuagga

SEQ ID NO: 17103 - RNA, 22 nt, Artificial Sequence
  SAMD9L targeting guide sequence portion
gaaaccaauuucuauguuacuu

SEQ ID NO: 17104 - RNA, 22 nt, Artificial Sequence
  SAMD9L targeting guide sequence portion
gaaacuggauagguagaagugg

SEQ ID NO: 17105 - RNA, 22 nt, Artificial Sequence
  SAMD9L targeting guide sequence portion
gaaaguugggguuuugugacuu

SEQ ID NO: 17106 - RNA, 22 nt, Artificial Sequence
  SAMD9L targeting guide sequence portion
gaaauaagcuauagcugcuaac

SEQ ID NO: 17107 - RNA, 22 nt, Artificial Sequence
  SAMD9L targeting guide sequence portion
gaaauugguuuccguagcauau

SEQ ID NO: 17108 - RNA, 22 nt, Artificial Sequence
  SAMD9L targeting guide sequence portion
gaacaggaauccacagcuggcu

SEQ ID NO: 17109 - RNA, 22 nt, Artificial Sequence
  SAMD9L targeting guide sequence portion
gaagauacauauauauauguau

SEQ ID NO: 17110 - RNA, 22 nt, Artificial Sequence
  SAMD9L targeting guide sequence portion
gaaguggguugaggaacaggaa

SEQ ID NO: 17111 - RNA, 22 nt, Artificial Sequence
  SAMD9L targeting guide sequence portion
gaauauugcaaauaaacuuuaa

SEQ ID NO: 17112 - RNA, 22 nt, Artificial Sequence
  SAMD9L targeting guide sequence portion
gaauccacagcuggcuaucuuu

SEQ ID NO: 17113 - RNA, 22 nt, Artificial Sequence
  SAMD9L targeting guide sequence portion
gaaucuuaaguaacauagaaau

SEQ ID NO: 17114 - RNA, 22 nt, Artificial Sequence
  SAMD9L targeting guide sequence portion
gaauuaggaugguaaaauagcu

SEQ ID NO: 17115 - RNA, 22 nt, Artificial Sequence
  SAMD9L targeting guide sequence portion
gaauuauacuuuauuuuuaaaa

SEQ ID NO: 17116 - RNA, 22 nt, Artificial Sequence
  SAMD9L targeting guide sequence portion
gaauuauuauaaggcuaaaagg

SEQ ID NO: 17117 - RNA, 22 nt, Artificial Sequence
  SAMD9L targeting guide sequence portion
gacaaagcaauauaauaaguau

SEQ ID NO: 17118 - RNA, 22 nt, Artificial Sequence
  SAMD9L targeting guide sequence portion
gacaauuauguauacauuauca

SEQ ID NO: 17119 - RNA, 22 nt, Artificial Sequence
  SAMD9L targeting guide sequence portion
gacacaccuuuuagccuuauaa

SEQ ID NO: 17120 - RNA, 22 nt, Artificial Sequence
  SAMD9L targeting guide sequence portion
gacucuaauuguaauuaugaaa

SEQ ID NO: 17121 - RNA, 22 nt, Artificial Sequence
  SAMD9L targeting guide sequence portion
gacucuuaaaacugcuugauac

SEQ ID NO: 17122 - RNA, 22 nt, Artificial Sequence
  SAMD9L targeting guide sequence portion
gacuuaaaagcagaaucuuaag

SEQ ID NO: 17123 - RNA, 22 nt, Artificial Sequence
  SAMD9L targeting guide sequence portion
gagaauuauuauaaggcuaaaa

SEQ ID NO: 17124 - RNA, 22 nt, Artificial Sequence
  SAMD9L targeting guide sequence portion
gagacaaagcaauauaauaagu

SEQ ID NO: 17125 - RNA, 22 nt, Artificial Sequence
  SAMD9L targeting guide sequence portion
gagcaguugguuaaauaaucug

SEQ ID NO: 17126 - RNA, 22 nt, Artificial Sequence
  SAMD9L targeting guide sequence portion
gaggaacaggaauccacagcug

SEQ ID NO: 17127 - RNA, 22 nt, Artificial Sequence
  SAMD9L targeting guide sequence portion
gagucaccuaagaaacaagggu

SEQ ID NO: 17128 - RNA, 22 nt, Artificial Sequence
  SAMD9L targeting guide sequence portion
gagucagccuuuagcaauauua

SEQ ID NO: 17129 - RNA, 22 nt, Artificial Sequence
  SAMD9L targeting guide sequence portion
gaguuccaaaagaaaacagauu

SEQ ID NO: 17130 - RNA, 22 nt, Artificial Sequence
  SAMD9L targeting guide sequence portion
gauaauguauacauaauugucu

SEQ ID NO: 17131 - RNA, 22 nt, Artificial Sequence
  SAMD9L targeting guide sequence portion
gauacauauauauauguauaau

SEQ ID NO: 17132 - RNA, 22 nt, Artificial Sequence
  SAMD9L targeting guide sequence portion
gauacuuacuuuagcuauuuua

SEQ ID NO: 17133 - RNA, 22 nt, Artificial Sequence
  SAMD9L targeting guide sequence portion
gauagccagcuguggauuccug

SEQ ID NO: 17134 - RNA, 22 nt, Artificial Sequence
  SAMD9L targeting guide sequence portion
gauagguagaaguggguugagg

SEQ ID NO: 17135 - RNA, 22 nt, Artificial Sequence
  SAMD9L targeting guide sequence portion
gaugguaaaauagcuaaaguaa

SEQ ID NO: 17136 - RNA, 22 nt, Artificial Sequence
  SAMD9L targeting guide sequence portion
gauuauuuaaccaacugcucug

SEQ ID NO: 17137 - RNA, 22 nt, Artificial Sequence
  SAMD9L targeting guide sequence portion
gauuccuguuccucaacccacu

SEQ ID NO: 17138 - RNA, 22 nt, Artificial Sequence
  SAMD9L targeting guide sequence portion
gauucugcuuuuaagucacaaa

SEQ ID NO: 17139 - RNA, 22 nt, Artificial Sequence
  SAMD9L targeting guide sequence portion
gauuuuaaaaauaaaguauaau

SEQ ID NO: 17140 - RNA, 22 nt, Artificial Sequence
  SAMD9L targeting guide sequence portion
gcaaauaaacuuuaaaauaaug

SEQ ID NO: 17141 - RNA, 22 nt, Artificial Sequence
  SAMD9L targeting guide sequence portion
gcaauauaauaaguauuuuaga

SEQ ID NO: 17142 - RNA, 22 nt, Artificial Sequence
  SAMD9L targeting guide sequence portion
gcaauauuauacauauauauau

SEQ ID NO: 17143 - RNA, 22 nt, Artificial Sequence
  SAMD9L targeting guide sequence portion
gcaauauuccuauaugcuacgg

SEQ ID NO: 17144 - RNA, 22 nt, Artificial Sequence
  SAMD9L targeting guide sequence portion
gcagaaucuuaaguaacauaga

SEQ ID NO: 17145 - RNA, 22 nt, Artificial Sequence
  SAMD9L targeting guide sequence portion
gcagcuauagcuuauuucauaa

SEQ ID NO: 17146 - RNA, 22 nt, Artificial Sequence
  SAMD9L targeting guide sequence portion
gcaguugguuaaauaaucuguu

SEQ ID NO: 17147 - RNA, 22 nt, Artificial Sequence
  SAMD9L targeting guide sequence portion
gcaguuuuaagagucagccuuu

SEQ ID NO: 17148 - RNA, 22 nt, Artificial Sequence
  SAMD9L targeting guide sequence portion
gcauauaggaauauugcaaaua

SEQ ID NO: 17149 - RNA, 22 nt, Artificial Sequence
  SAMD9L targeting guide sequence portion
gccagcuguggauuccuguucc

SEQ ID NO: 17150 - RNA, 22 nt, Artificial Sequence
  SAMD9L targeting guide sequence portion
gccuuauaauaauucucccuuu

SEQ ID NO: 17151 - RNA, 22 nt, Artificial Sequence
  SAMD9L targeting guide sequence portion
gccuuuagcaauauuauacaua

SEQ ID NO: 17152 - RNA, 22 nt, Artificial Sequence
  SAMD9L targeting guide sequence portion
gcuaaaagggagaauuauuaua

SEQ ID NO: 17153 - RNA, 22 nt, Artificial Sequence
  SAMD9L targeting guide sequence portion
gcuaaaaggugugucaccaguu

SEQ ID NO: 17154 - RNA, 22 nt, Artificial Sequence
  SAMD9L targeting guide sequence portion
gcuaaaggcugacucuuaaaac

SEQ ID NO: 17155 - RNA, 22 nt, Artificial Sequence
  SAMD9L targeting guide sequence portion
gcuaaaguaaguaucaagcagu

SEQ ID NO: 17156 - RNA, 22 nt, Artificial Sequence
  SAMD9L targeting guide sequence portion
gcuaacuggugacacaccuuuu

SEQ ID NO: 17157 - RNA, 22 nt, Artificial Sequence
  SAMD9L targeting guide sequence portion
gcuacggaaaccaauuucuaug

SEQ ID NO: 17158 - RNA, 22 nt, Artificial Sequence
  SAMD9L targeting guide sequence portion
gcuauagcugcuaacuggugac

SEQ ID NO: 17159 - RNA, 22 nt, Artificial Sequence
  SAMD9L targeting guide sequence portion
gcuauagcuuauuucauaauua

SEQ ID NO: 17160 - RNA, 22 nt, Artificial Sequence
  SAMD9L targeting guide sequence portion
gcuaucuuuguuacauaguaac

SEQ ID NO: 17161 - RNA, 22 nt, Artificial Sequence
  SAMD9L targeting guide sequence portion
gcuauuuuaccauccuaauuca

SEQ ID NO: 17162 - RNA, 22 nt, Artificial Sequence
  SAMD9L targeting guide sequence portion
gcucuguuacuauguaacaaag

SEQ ID NO: 17163 - RNA, 22 nt, Artificial Sequence
  SAMD9L targeting guide sequence portion
gcugacucuuaaaacugcuuga

SEQ ID NO: 17164 - RNA, 22 nt, Artificial Sequence
  SAMD9L targeting guide sequence portion
gcugcuaacuggugacacaccu

SEQ ID NO: 17165 - RNA, 22 nt, Artificial Sequence
  SAMD9L targeting guide sequence portion
gcuggcuaucuuuguuacauag

SEQ ID NO: 17166 - RNA, 22 nt, Artificial Sequence
  SAMD9L targeting guide sequence portion
gcuguggauuccuguuccucaa

SEQ ID NO: 17167 - RNA, 22 nt, Artificial Sequence
  SAMD9L targeting guide sequence portion
gcuuaacuuggugaaaguuggg

SEQ ID NO: 17168 - RNA, 22 nt, Artificial Sequence
  SAMD9L targeting guide sequence portion
gcuuauuucauaauuacaauua

SEQ ID NO: 17169 - RNA, 22 nt, Artificial Sequence
  SAMD9L targeting guide sequence portion
gcuugaguuccaaaagaaaaca

SEQ ID NO: 17170 - RNA, 22 nt, Artificial Sequence
  SAMD9L targeting guide sequence portion
gcuugauacuuacuuuagcuau

SEQ ID NO: 17171 - RNA, 22 nt, Artificial Sequence
  SAMD9L targeting guide sequence portion
gcuuuuaagucacaaaacccca

SEQ ID NO: 17172 - RNA, 22 nt, Artificial Sequence
  SAMD9L targeting guide sequence portion
ggaaaccaauuucuauguuacu

SEQ ID NO: 17173 - RNA, 22 nt, Artificial Sequence
  SAMD9L targeting guide sequence portion
ggaacaggaauccacagcuggc

SEQ ID NO: 17174 - RNA, 22 nt, Artificial Sequence
  SAMD9L targeting guide sequence portion
ggaauauugcaaauaaacuuua

SEQ ID NO: 17175 - RNA, 22 nt, Artificial Sequence
  SAMD9L targeting guide sequence portion
ggaauccacagcuggcuaucuu

SEQ ID NO: 17176 - RNA, 22 nt, Artificial Sequence
  SAMD9L targeting guide sequence portion
ggagaauuauuauaaggcuaaa

SEQ ID NO: 17177 - RNA, 22 nt, Artificial Sequence
  SAMD9L targeting guide sequence portion
ggauagguagaaguggguugag

SEQ ID NO: 17178 - RNA, 22 nt, Artificial Sequence
  SAMD9L targeting guide sequence portion
ggaugguaaaauagcuaaagua

SEQ ID NO: 17179 - RNA, 22 nt, Artificial Sequence
  SAMD9L targeting guide sequence portion
ggauuccuguuccucaacccac

SEQ ID NO: 17180 - RNA, 22 nt, Artificial Sequence
  SAMD9L targeting guide sequence portion
ggcuaaaaggugugucaccagu

SEQ ID NO: 17181 - RNA, 22 nt, Artificial Sequence
  SAMD9L targeting guide sequence portion
ggcuaucuuuguuacauaguaa

SEQ ID NO: 17182 - RNA, 22 nt, Artificial Sequence
  SAMD9L targeting guide sequence portion
ggcugacucuuaaaacugcuug

SEQ ID NO: 17183 - RNA, 22 nt, Artificial Sequence
  SAMD9L targeting guide sequence portion
gggagaauuauuauaaggcuaa

SEQ ID NO: 17184 - RNA, 22 nt, Artificial Sequence
  SAMD9L targeting guide sequence portion
gggguuuugugacuuaaaagca

SEQ ID NO: 17185 - RNA, 22 nt, Artificial Sequence
  SAMD9L targeting guide sequence portion
ggguaugaauuaggaugguaaa

SEQ ID NO: 17186 - RNA, 22 nt, Artificial Sequence
  SAMD9L targeting guide sequence portion
ggguugaggaacaggaauccac

SEQ ID NO: 17187 - RNA, 22 nt, Artificial Sequence
  SAMD9L targeting guide sequence portion
ggguuuugugacuuaaaagcag

SEQ ID NO: 17188 - RNA, 22 nt, Artificial Sequence
  SAMD9L targeting guide sequence portion
gguaaaauagcuaaaguaagua

SEQ ID NO: 17189 - RNA, 22 nt, Artificial Sequence
  SAMD9L targeting guide sequence portion
gguagaaguggguugaggaaca

SEQ ID NO: 17190 - RNA, 22 nt, Artificial Sequence
  SAMD9L targeting guide sequence portion
gguaugaauuaggaugguaaaa

SEQ ID NO: 17191 - RNA, 22 nt, Artificial Sequence
  SAMD9L targeting guide sequence portion
ggugaaaguugggguuuuguga

SEQ ID NO: 17192 - RNA, 22 nt, Artificial Sequence
  SAMD9L targeting guide sequence portion
ggugacacaccuuuuagccuua

SEQ ID NO: 17193 - RNA, 22 nt, Artificial Sequence
  SAMD9L targeting guide sequence portion
ggugacucuaauuguaauuaug

SEQ ID NO: 17194 - RNA, 22 nt, Artificial Sequence
  SAMD9L targeting guide sequence portion
ggugugucaccaguuagcagcu

SEQ ID NO: 17195 - RNA, 22 nt, Artificial Sequence
  SAMD9L targeting guide sequence portion
gguuaaauaaucuguuuucuuu

SEQ ID NO: 17196 - RNA, 22 nt, Artificial Sequence
  SAMD9L targeting guide sequence portion
gguugaggaacaggaauccaca

SEQ ID NO: 17197 - RNA, 22 nt, Artificial Sequence
  SAMD9L targeting guide sequence portion
gguuuccguagcauauaggaau

SEQ ID NO: 17198 - RNA, 22 nt, Artificial Sequence
  SAMD9L targeting guide sequence portion
gguuuugugacuuaaaagcaga

SEQ ID NO: 17199 - RNA, 22 nt, Artificial Sequence
  SAMD9L targeting guide sequence portion
guaaaauagcuaaaguaaguau

SEQ ID NO: 17200 - RNA, 22 nt, Artificial Sequence
  SAMD9L targeting guide sequence portion
guaacaaagauagccagcugug

SEQ ID NO: 17201 - RNA, 22 nt, Artificial Sequence
  SAMD9L targeting guide sequence portion
guaacagagcaguugguuaaau

SEQ ID NO: 17202 - RNA, 22 nt, Artificial Sequence
  SAMD9L targeting guide sequence portion
guaacauagaaauugguuuccg

SEQ ID NO: 17203 - RNA, 22 nt, Artificial Sequence
  SAMD9L targeting guide sequence portion
guaaguaucaagcaguuuuaag

SEQ ID NO: 17204 - RNA, 22 nt, Artificial Sequence
  SAMD9L targeting guide sequence portion
guaauuaugaaauaagcuauag

SEQ ID NO: 17205 - RNA, 22 nt, Artificial Sequence
  SAMD9L targeting guide sequence portion
guagaaguggguugaggaacag

SEQ ID NO: 17206 - RNA, 22 nt, Artificial Sequence
  SAMD9L targeting guide sequence portion
guagcauauaggaauauugcaa

SEQ ID NO: 17207 - RNA, 22 nt, Artificial Sequence
  SAMD9L targeting guide sequence portion
guauaauauugcuaaaggcuga

SEQ ID NO: 17208 - RNA, 22 nt, Artificial Sequence
  SAMD9L targeting guide sequence portion
guauaauucuaaaauacuuauu

SEQ ID NO: 17209 - RNA, 22 nt, Artificial Sequence
  SAMD9L targeting guide sequence portion
guauacauaauugucuauguga

SEQ ID NO: 17210 - RNA, 22 nt, Artificial Sequence
  SAMD9L targeting guide sequence portion
guauacauuaucauacagaaga

SEQ ID NO: 17211 - RNA, 22 nt, Artificial Sequence
  SAMD9L targeting guide sequence portion
guaucaagcaguuuuaagaguc

SEQ ID NO: 17212 - RNA, 22 nt, Artificial Sequence
  SAMD9L targeting guide sequence portion
guaucuucuguaugauaaugua

SEQ ID NO: 17213 - RNA, 22 nt, Artificial Sequence
  SAMD9L targeting guide sequence portion
guaugaauuaggaugguaaaau

SEQ ID NO: 17214 - RNA, 22 nt, Artificial Sequence
  SAMD9L targeting guide sequence portion
guaugauaauguauacauaauu

SEQ ID NO: 17215 - RNA, 22 nt, Artificial Sequence
  SAMD9L targeting guide sequence portion
guauuuuagaauuauacuuuau

SEQ ID NO: 17216 - RNA, 22 nt, Artificial Sequence
  SAMD9L targeting guide sequence portion
gucacaaaaccccaacuuucac

SEQ ID NO: 17217 - RNA, 22 nt, Artificial Sequence
  SAMD9L targeting guide sequence portion
gucaccaguuagcagcuauagc

SEQ ID NO: 17218 - RNA, 22 nt, Artificial Sequence
  SAMD9L targeting guide sequence portion
gucaccuaagaaacaaggguau

SEQ ID NO: 17219 - RNA, 22 nt, Artificial Sequence
  SAMD9L targeting guide sequence portion
gucagccuuuagcaauauuaua

SEQ ID NO: 17220 - RNA, 22 nt, Artificial Sequence
  SAMD9L targeting guide sequence portion
gucuaugugauuuuaaaaauaa

SEQ ID NO: 17221 - RNA, 22 nt, Artificial Sequence
  SAMD9L targeting guide sequence portion
gugaaaguugggguuuugugac

SEQ ID NO: 17222 - RNA, 22 nt, Artificial Sequence
  SAMD9L targeting guide sequence portion
gugacacaccuuuuagccuuau

SEQ ID NO: 17223 - RNA, 22 nt, Artificial Sequence
  SAMD9L targeting guide sequence portion
gugacucuaauuguaauuauga

SEQ ID NO: 17224 - RNA, 22 nt, Artificial Sequence
  SAMD9L targeting guide sequence portion
gugacuuaaaagcagaaucuua

SEQ ID NO: 17225 - RNA, 22 nt, Artificial Sequence
  SAMD9L targeting guide sequence portion
gugauuuuaaaaauaaaguaua

SEQ ID NO: 17226 - RNA, 22 nt, Artificial Sequence
  SAMD9L targeting guide sequence portion
guggauuccuguuccucaaccc

SEQ ID NO: 17227 - RNA, 22 nt, Artificial Sequence
  SAMD9L targeting guide sequence portion
guggguugaggaacaggaaucc

SEQ ID NO: 17228 - RNA, 22 nt, Artificial Sequence
  SAMD9L targeting guide sequence portion
gugucaccaguuagcagcuaua

SEQ ID NO: 17229 - RNA, 22 nt, Artificial Sequence
  SAMD9L targeting guide sequence portion
gugugucaccaguuagcagcua

SEQ ID NO: 17230 - RNA, 22 nt, Artificial Sequence
  SAMD9L targeting guide sequence portion
guuaaauaaucuguuuucuuuu

SEQ ID NO: 17231 - RNA, 22 nt, Artificial Sequence
  SAMD9L targeting guide sequence portion
guuaagcuaaaagggagaauua

SEQ ID NO: 17232 - RNA, 22 nt, Artificial Sequence
  SAMD9L targeting guide sequence portion
guuacauaguaacagagcaguu

SEQ ID NO: 17233 - RNA, 22 nt, Artificial Sequence
  SAMD9L targeting guide sequence portion
guuacuauguaacaaagauagc

SEQ ID NO: 17234 - RNA, 22 nt, Artificial Sequence
  SAMD9L targeting guide sequence portion
guuacuuaagauucugcuuuua

SEQ ID NO: 17235 - RNA, 22 nt, Artificial Sequence
  SAMD9L targeting guide sequence portion
guuagcagcuauagcuuauuuc

SEQ ID NO: 17236 - RNA, 22 nt, Artificial Sequence
  SAMD9L targeting guide sequence portion
guuccaaaagaaaacagauuau

SEQ ID NO: 17237 - RNA, 22 nt, Artificial Sequence
  SAMD9L targeting guide sequence portion
guuccucaacccacuucuaccu

SEQ ID NO: 17238 - RNA, 22 nt, Artificial Sequence
  SAMD9L targeting guide sequence portion
guugaggaacaggaauccacag

SEQ ID NO: 17239 - RNA, 22 nt, Artificial Sequence
  SAMD9L targeting guide sequence portion
guugggguuuugugacuuaaaa

SEQ ID NO: 17240 - RNA, 22 nt, Artificial Sequence
  SAMD9L targeting guide sequence portion
guugguuaaauaaucuguuuuc

SEQ ID NO: 17241 - RNA, 22 nt, Artificial Sequence
  SAMD9L targeting guide sequence portion
guuuauuugcaauauuccuaua

SEQ ID NO: 17242 - RNA, 22 nt, Artificial Sequence
  SAMD9L targeting guide sequence portion
guuucauuauuuuaaaguuuau

SEQ ID NO: 17243 - RNA, 22 nt, Artificial Sequence
  SAMD9L targeting guide sequence portion
guuuccguagcauauaggaaua

SEQ ID NO: 17244 - RNA, 22 nt, Artificial Sequence
  SAMD9L targeting guide sequence portion
guuucuuaggugacucuaauug

SEQ ID NO: 17245 - RNA, 22 nt, Artificial Sequence
  SAMD9L targeting guide sequence portion
guuuuaagagucagccuuuagc

SEQ ID NO: 17246 - RNA, 22 nt, Artificial Sequence
  SAMD9L targeting guide sequence portion
guuuugugacuuaaaagcagaa

SEQ ID NO: 17247 - RNA, 22 nt, Artificial Sequence
  SAMD9L targeting guide sequence portion
uaaaaauaaaguauaauucuaa

SEQ ID NO: 17248 - RNA, 22 nt, Artificial Sequence
  SAMD9L targeting guide sequence portion
uaaaacugcuugauacuuacuu

SEQ ID NO: 17249 - RNA, 22 nt, Artificial Sequence
  SAMD9L targeting guide sequence portion
uaaaagcagaaucuuaaguaac

SEQ ID NO: 17250 - RNA, 22 nt, Artificial Sequence
  SAMD9L targeting guide sequence portion
uaaaaggugugucaccaguuag

SEQ ID NO: 17251 - RNA, 22 nt, Artificial Sequence
  SAMD9L targeting guide sequence portion
uaaaauaaugaaacuggauagg

SEQ ID NO: 17252 - RNA, 22 nt, Artificial Sequence
  SAMD9L targeting guide sequence portion
uaaaauacuuauuauauugcuu

SEQ ID NO: 17253 - RNA, 22 nt, Artificial Sequence
  SAMD9L targeting guide sequence portion
uaaaauagcuaaaguaaguauc

SEQ ID NO: 17254 - RNA, 22 nt, Artificial Sequence
  SAMD9L targeting guide sequence portion
uaaaaucacauagacaauuaug

SEQ ID NO: 17255 - RNA, 22 nt, Artificial Sequence
  SAMD9L targeting guide sequence portion
uaaacuuuaaaauaaugaaacu

SEQ ID NO: 17256 - RNA, 22 nt, Artificial Sequence
  SAMD9L targeting guide sequence portion
uaaaggcugacucuuaaaacug

SEQ ID NO: 17257 - RNA, 22 nt, Artificial Sequence
  SAMD9L targeting guide sequence portion
uaaaguaaguaucaagcaguuu

SEQ ID NO: 17258 - RNA, 22 nt, Artificial Sequence
  SAMD9L targeting guide sequence portion
uaaaguauaauucuaaaauacu

SEQ ID NO: 17259 - RNA, 22 nt, Artificial Sequence
  SAMD9L targeting guide sequence portion
uaaaguuuauuugcaauauucc

SEQ ID NO: 17260 - RNA, 22 nt, Artificial Sequence
  SAMD9L targeting guide sequence portion
uaaauaaucuguuuucuuuugg

SEQ ID NO: 17261 - RNA, 22 nt, Artificial Sequence
  SAMD9L targeting guide sequence portion
uaacaaagauagccagcugugg

SEQ ID NO: 17262 - RNA, 22 nt, Artificial Sequence
  SAMD9L targeting guide sequence portion
uaacagagcaguugguuaaaua

SEQ ID NO: 17263 - RNA, 22 nt, Artificial Sequence
  SAMD9L targeting guide sequence portion
uaacauagaaauugguuuccgu

SEQ ID NO: 17264 - RNA, 22 nt, Artificial Sequence
  SAMD9L targeting guide sequence portion
uaaccaacugcucuguuacuau

SEQ ID NO: 17265 - RNA, 22 nt, Artificial Sequence
  SAMD9L targeting guide sequence portion
uaacuggugacacaccuuuuag

SEQ ID NO: 17266 - RNA, 22 nt, Artificial Sequence
  SAMD9L targeting guide sequence portion
uaacuuggugaaaguugggguu

SEQ ID NO: 17267 - RNA, 22 nt, Artificial Sequence
  SAMD9L targeting guide sequence portion
uaagaaacaaggguaugaauua

SEQ ID NO: 17268 - RNA, 22 nt, Artificial Sequence
  SAMD9L targeting guide sequence portion
uaagagucagccuuuagcaaua

SEQ ID NO: 17269 - RNA, 22 nt, Artificial Sequence
  SAMD9L targeting guide sequence portion
uaagauucugcuuuuaagucac

SEQ ID NO: 17270 - RNA, 22 nt, Artificial Sequence
  SAMD9L targeting guide sequence portion
uaagcuaaaagggagaauuauu

SEQ ID NO: 17271 - RNA, 22 nt, Artificial Sequence
  SAMD9L targeting guide sequence portion
uaagcuauagcugcuaacuggu

SEQ ID NO: 17272 - RNA, 22 nt, Artificial Sequence
  SAMD9L targeting guide sequence portion
uaaggcuaaaaggugugucacc

SEQ ID NO: 17273 - RNA, 22 nt, Artificial Sequence
  SAMD9L targeting guide sequence portion
uaaguaacauagaaauugguuu

SEQ ID NO: 17274 - RNA, 22 nt, Artificial Sequence
  SAMD9L targeting guide sequence portion
uaaguaucaagcaguuuuaaga

SEQ ID NO: 17275 - RNA, 22 nt, Artificial Sequence
  SAMD9L targeting guide sequence portion
uaaguauuuuagaauuauacuu

SEQ ID NO: 17276 - RNA, 22 nt, Artificial Sequence
  SAMD9L targeting guide sequence portion
uaagucacaaaaccccaacuuu

SEQ ID NO: 17277 - RNA, 22 nt, Artificial Sequence
  SAMD9L targeting guide sequence portion
uaauaaguauuuuagaauuaua

SEQ ID NO: 17278 - RNA, 22 nt, Artificial Sequence
  SAMD9L targeting guide sequence portion
uaauaauucucccuuuuagcuu

SEQ ID NO: 17279 - RNA, 22 nt, Artificial Sequence
  SAMD9L targeting guide sequence portion
uaauauugcuaaaggcugacuc

SEQ ID NO: 17280 - RNA, 22 nt, Artificial Sequence
  SAMD9L targeting guide sequence portion
uaaucuguuuucuuuuggaacu

SEQ ID NO: 17281 - RNA, 22 nt, Artificial Sequence
  SAMD9L targeting guide sequence portion
uaaugaaacuggauagguagaa

SEQ ID NO: 17282 - RNA, 22 nt, Artificial Sequence
  SAMD9L targeting guide sequence portion
uaauguauacauaauugucuau

SEQ ID NO: 17283 - RNA, 22 nt, Artificial Sequence
  SAMD9L targeting guide sequence portion
uaauuacaauuagagucaccua

SEQ ID NO: 17284 - RNA, 22 nt, Artificial Sequence
  SAMD9L targeting guide sequence portion
uaauuaugaaauaagcuauagc

SEQ ID NO: 17285 - RNA, 22 nt, Artificial Sequence
  SAMD9L targeting guide sequence portion
uaauucauacccuuguuucuua

SEQ ID NO: 17286 - RNA, 22 nt, Artificial Sequence
  SAMD9L targeting guide sequence portion
uaauucuaaaauacuuauuaua

SEQ ID NO: 17287 - RNA, 22 nt, Artificial Sequence
  SAMD9L targeting guide sequence portion
uaauucucccuuuuagcuuaac

SEQ ID NO: 17288 - RNA, 22 nt, Artificial Sequence
  SAMD9L targeting guide sequence portion
uaauuguaauuaugaaauaagc

SEQ ID NO: 17289 - RNA, 22 nt, Artificial Sequence
  SAMD9L targeting guide sequence portion
uaauugucuaugugauuuuaaa

SEQ ID NO: 17290 - RNA, 22 nt, Artificial Sequence
  SAMD9L targeting guide sequence portion
uacaauuagagucaccuaagaa

SEQ ID NO: 17291 - RNA, 22 nt, Artificial Sequence
  SAMD9L targeting guide sequence portion
uacagaagauacauauauauau

SEQ ID NO: 17292 - RNA, 22 nt, Artificial Sequence
  SAMD9L targeting guide sequence portion
uacauaauugucuaugugauuu

SEQ ID NO: 17293 - RNA, 22 nt, Artificial Sequence
  SAMD9L targeting guide sequence portion
uacauaguaacagagcaguugg

SEQ ID NO: 17294 - RNA, 22 nt, Artificial Sequence
  SAMD9L targeting guide sequence portion
uacauauauauauguauaauau

SEQ ID NO: 17295 - RNA, 22 nt, Artificial Sequence
  SAMD9L targeting guide sequence portion
uacauauauauauguaucuucu

SEQ ID NO: 17296 - RNA, 22 nt, Artificial Sequence
  SAMD9L targeting guide sequence portion
uacauuaucauacagaagauac

SEQ ID NO: 17297 - RNA, 22 nt, Artificial Sequence
  SAMD9L targeting guide sequence portion
uaccauccuaauucauacccuu

SEQ ID NO: 17298 - RNA, 22 nt, Artificial Sequence
  SAMD9L targeting guide sequence portion
uacccuuguuucuuaggugacu

SEQ ID NO: 17299 - RNA, 22 nt, Artificial Sequence
  SAMD9L targeting guide sequence portion
uaccuauccaguuucauuauuu

SEQ ID NO: 17300 - RNA, 22 nt, Artificial Sequence
  SAMD9L targeting guide sequence portion
uacggaaaccaauuucuauguu

SEQ ID NO: 17301 - RNA, 22 nt, Artificial Sequence
  SAMD9L targeting guide sequence portion
uacuauguaacaaagauagcca

SEQ ID NO: 17302 - RNA, 22 nt, Artificial Sequence
  SAMD9L targeting guide sequence portion
uacuuaagauucugcuuuuaag

SEQ ID NO: 17303 - RNA, 22 nt, Artificial Sequence
  SAMD9L targeting guide sequence portion
uacuuacuuuagcuauuuuacc

SEQ ID NO: 17304 - RNA, 22 nt, Artificial Sequence
  SAMD9L targeting guide sequence portion
uacuuuagcuauuuuaccaucc

SEQ ID NO: 17305 - RNA, 22 nt, Artificial Sequence
  SAMD9L targeting guide sequence portion
uacuuuauuuuuaaaaucacau

SEQ ID NO: 17306 - RNA, 22 nt, Artificial Sequence
  SAMD9L targeting guide sequence portion
uagaaauugguuuccguagcau

SEQ ID NO: 17307 - RNA, 22 nt, Artificial Sequence
  SAMD9L targeting guide sequence portion
uagaaguggguugaggaacagg

SEQ ID NO: 17308 - RNA, 22 nt, Artificial Sequence
  SAMD9L targeting guide sequence portion
uagaauuauacuuuauuuuuaa

SEQ ID NO: 17309 - RNA, 22 nt, Artificial Sequence
  SAMD9L targeting guide sequence portion
uagacaauuauguauacauuau

SEQ ID NO: 17310 - RNA, 22 nt, Artificial Sequence
  SAMD9L targeting guide sequence portion
uagagucaccuaagaaacaagg

SEQ ID NO: 17311 - RNA, 22 nt, Artificial Sequence
  SAMD9L targeting guide sequence portion
uagcaauauuauacauauauau

SEQ ID NO: 17312 - RNA, 22 nt, Artificial Sequence
  SAMD9L targeting guide sequence portion
uagcagcuauagcuuauuucau

SEQ ID NO: 17313 - RNA, 22 nt, Artificial Sequence
  SAMD9L targeting guide sequence portion
uagcauauaggaauauugcaaa

SEQ ID NO: 17314 - RNA, 22 nt, Artificial Sequence
  SAMD9L targeting guide sequence portion
uagccagcuguggauuccuguu

SEQ ID NO: 17315 - RNA, 22 nt, Artificial Sequence
  SAMD9L targeting guide sequence portion
uagccuuauaauaauucucccu

SEQ ID NO: 17316 - RNA, 22 nt, Artificial Sequence
  SAMD9L targeting guide sequence portion
uagcuaaaguaaguaucaagca

SEQ ID NO: 17317 - RNA, 22 nt, Artificial Sequence
  SAMD9L targeting guide sequence portion
uagcuauuuuaccauccuaauu

SEQ ID NO: 17318 - RNA, 22 nt, Artificial Sequence
  SAMD9L targeting guide sequence portion
uagcugcuaacuggugacacac

SEQ ID NO: 17319 - RNA, 22 nt, Artificial Sequence
  SAMD9L targeting guide sequence portion
uagcuuaacuuggugaaaguug

SEQ ID NO: 17320 - RNA, 22 nt, Artificial Sequence
  SAMD9L targeting guide sequence portion
uagcuuauuucauaauuacaau

SEQ ID NO: 17321 - RNA, 22 nt, Artificial Sequence
  SAMD9L targeting guide sequence portion
uaggaauauugcaaauaaacuu

SEQ ID NO: 17322 - RNA, 22 nt, Artificial Sequence
  SAMD9L targeting guide sequence portion
uaggaugguaaaauagcuaaag

SEQ ID NO: 17323 - RNA, 22 nt, Artificial Sequence
  SAMD9L targeting guide sequence portion
uagguagaaguggguugaggaa

SEQ ID NO: 17324 - RNA, 22 nt, Artificial Sequence
  SAMD9L targeting guide sequence portion
uaggugacucuaauuguaauua

SEQ ID NO: 17325 - RNA, 22 nt, Artificial Sequence
  SAMD9L targeting guide sequence portion
uaguaacagagcaguugguuaa

SEQ ID NO: 17326 - RNA, 22 nt, Artificial Sequence
  SAMD9L targeting guide sequence portion
uauaaggcuaaaagguguguca

SEQ ID NO: 17327 - RNA, 22 nt, Artificial Sequence
  SAMD9L targeting guide sequence portion
uauaauaaguauuuuagaauua

SEQ ID NO: 17328 - RNA, 22 nt, Artificial Sequence
  SAMD9L targeting guide sequence portion
uauaauaauucucccuuuuagc

SEQ ID NO: 17329 - RNA, 22 nt, Artificial Sequence
  SAMD9L targeting guide sequence portion
uauaauauugcuaaaggcugac

SEQ ID NO: 17330 - RNA, 22 nt, Artificial Sequence
  SAMD9L targeting guide sequence portion
uauaauucuaaaauacuuauua

SEQ ID NO: 17331 - RNA, 22 nt, Artificial Sequence
  SAMD9L targeting guide sequence portion
uauacauaauugucuaugugau

SEQ ID NO: 17332 - RNA, 22 nt, Artificial Sequence
  SAMD9L targeting guide sequence portion
uauacauauauauauguaucuu

SEQ ID NO: 17333 - RNA, 22 nt, Artificial Sequence
  SAMD9L targeting guide sequence portion
uauacauuaucauacagaagau

SEQ ID NO: 17334 - RNA, 22 nt, Artificial Sequence
  SAMD9L targeting guide sequence portion
uauacuuuauuuuuaaaaucac

SEQ ID NO: 17335 - RNA, 22 nt, Artificial Sequence
  SAMD9L targeting guide sequence portion
uauagcugcuaacuggugacac

SEQ ID NO: 17336 - RNA, 22 nt, Artificial Sequence
  SAMD9L targeting guide sequence portion
uauagcuuauuucauaauuaca

SEQ ID NO: 17337 - RNA, 22 nt, Artificial Sequence
  SAMD9L targeting guide sequence portion
uauaggaauauugcaaauaaac

SEQ ID NO: 17338 - RNA, 22 nt, Artificial Sequence
  SAMD9L targeting guide sequence portion
uauauauauguauaauauugcu

SEQ ID NO: 17339 - RNA, 22 nt, Artificial Sequence
  SAMD9L targeting guide sequence portion
uauauauauguaucuucuguau

SEQ ID NO: 17340 - RNA, 22 nt, Artificial Sequence
  SAMD9L targeting guide sequence portion
uauauauguauaauauugcuaa

SEQ ID NO: 17341 - RNA, 22 nt, Artificial Sequence
  SAMD9L targeting guide sequence portion
uauauauguaucuucuguauga

SEQ ID NO: 17342 - RNA, 22 nt, Artificial Sequence
  SAMD9L targeting guide sequence portion
uauaugcuacggaaaccaauuu

SEQ ID NO: 17343 - RNA, 22 nt, Artificial Sequence
  SAMD9L targeting guide sequence portion
uauauguauaauauugcuaaag

SEQ ID NO: 17344 - RNA, 22 nt, Artificial Sequence
  SAMD9L targeting guide sequence portion
uauauguaucuucuguaugaua

SEQ ID NO: 17345 - RNA, 22 nt, Artificial Sequence
  SAMD9L targeting guide sequence portion
uaucaagcaguuuuaagaguca

SEQ ID NO: 17346 - RNA, 22 nt, Artificial Sequence
  SAMD9L targeting guide sequence portion
uaucauacagaagauacauaua

SEQ ID NO: 17347 - RNA, 22 nt, Artificial Sequence
  SAMD9L targeting guide sequence portion
uauccaguuucauuauuuuaaa

SEQ ID NO: 17348 - RNA, 22 nt, Artificial Sequence
  SAMD9L targeting guide sequence portion
uaucuucuguaugauaauguau

SEQ ID NO: 17349 - RNA, 22 nt, Artificial Sequence
  SAMD9L targeting guide sequence portion
uaucuuuguuacauaguaacag

SEQ ID NO: 17350 - RNA, 22 nt, Artificial Sequence
  SAMD9L targeting guide sequence portion
uaugaaauaagcuauagcugcu

SEQ ID NO: 17351 - RNA, 22 nt, Artificial Sequence
  SAMD9L targeting guide sequence portion
uaugaauuaggaugguaaaaua

SEQ ID NO: 17352 - RNA, 22 nt, Artificial Sequence
  SAMD9L targeting guide sequence portion
uaugauaauguauacauaauug

SEQ ID NO: 17353 - RNA, 22 nt, Artificial Sequence
  SAMD9L targeting guide sequence portion
uaugcuacggaaaccaauuucu

SEQ ID NO: 17354 - RNA, 22 nt, Artificial Sequence
  SAMD9L targeting guide sequence portion
uauguaacaaagauagccagcu

SEQ ID NO: 17355 - RNA, 22 nt, Artificial Sequence
  SAMD9L targeting guide sequence portion
uauguauaauauugcuaaaggc

SEQ ID NO: 17356 - RNA, 22 nt, Artificial Sequence
  SAMD9L targeting guide sequence portion
uauguauacauuaucauacaga

SEQ ID NO: 17357 - RNA, 22 nt, Artificial Sequence
  SAMD9L targeting guide sequence portion
uauguaucuucuguaugauaau

SEQ ID NO: 17358 - RNA, 22 nt, Artificial Sequence
  SAMD9L targeting guide sequence portion
uaugugauuuuaaaaauaaagu

SEQ ID NO: 17359 - RNA, 22 nt, Artificial Sequence
  SAMD9L targeting guide sequence portion
uauguuacuuaagauucugcuu

SEQ ID NO: 17360 - RNA, 22 nt, Artificial Sequence
  SAMD9L targeting guide sequence portion
uauuauaaggcuaaaaggugug

SEQ ID NO: 17361 - RNA, 22 nt, Artificial Sequence
  SAMD9L targeting guide sequence portion
uauuauacauauauauauguau

SEQ ID NO: 17362 - RNA, 22 nt, Artificial Sequence
  SAMD9L targeting guide sequence portion
uauuccuauaugcuacggaaac

SEQ ID NO: 17363 - RNA, 22 nt, Artificial Sequence
  SAMD9L targeting guide sequence portion
uauugcaaauaaacuuuaaaau

SEQ ID NO: 17364 - RNA, 22 nt, Artificial Sequence
  SAMD9L targeting guide sequence portion
uauugcuaaaggcugacucuua

SEQ ID NO: 17365 - RNA, 22 nt, Artificial Sequence
  SAMD9L targeting guide sequence portion
uauuuaaccaacugcucuguua

SEQ ID NO: 17366 - RNA, 22 nt, Artificial Sequence
  SAMD9L targeting guide sequence portion
uauuucauaauuacaauuagag

SEQ ID NO: 17367 - RNA, 22 nt, Artificial Sequence
  SAMD9L targeting guide sequence portion
uauuugcaauauuccuauaugc

SEQ ID NO: 17368 - RNA, 22 nt, Artificial Sequence
  SAMD9L targeting guide sequence portion
uauuuuaaaguuuauuugcaau

SEQ ID NO: 17369 - RNA, 22 nt, Artificial Sequence
  SAMD9L targeting guide sequence portion
uauuuuaccauccuaauucaua

SEQ ID NO: 17370 - RNA, 22 nt, Artificial Sequence
  SAMD9L targeting guide sequence portion
uauuuuagaauuauacuuuauu

SEQ ID NO: 17371 - RNA, 22 nt, Artificial Sequence
  SAMD9L targeting guide sequence portion
uauuuuuaaaaucacauagaca

SEQ ID NO: 17372 - RNA, 22 nt, Artificial Sequence
  SAMD9L targeting guide sequence portion
ucaacccacuucuaccuaucca

SEQ ID NO: 17373 - RNA, 22 nt, Artificial Sequence
  SAMD9L targeting guide sequence portion
ucaagcaguuuuaagagucagc

SEQ ID NO: 17374 - RNA, 22 nt, Artificial Sequence
  SAMD9L targeting guide sequence portion
ucacaaaaccccaacuuucacc

SEQ ID NO: 17375 - RNA, 22 nt, Artificial Sequence
  SAMD9L targeting guide sequence portion
ucacauagacaauuauguauac

SEQ ID NO: 17376 - RNA, 22 nt, Artificial Sequence
  SAMD9L targeting guide sequence portion
ucaccaaguuaagcuaaaaggg

SEQ ID NO: 17377 - RNA, 22 nt, Artificial Sequence
  SAMD9L targeting guide sequence portion
ucaccaguuagcagcuauagcu

SEQ ID NO: 17378 - RNA, 22 nt, Artificial Sequence
  SAMD9L targeting guide sequence portion
ucaccuaagaaacaaggguaug

SEQ ID NO: 17379 - RNA, 22 nt, Artificial Sequence
  SAMD9L targeting guide sequence portion
ucagccuuuagcaauauuauac

SEQ ID NO: 17380 - RNA, 22 nt, Artificial Sequence
  SAMD9L targeting guide sequence portion
ucauaauuacaauuagagucac

SEQ ID NO: 17381 - RNA, 22 nt, Artificial Sequence
  SAMD9L targeting guide sequence portion
ucauacagaagauacauauaua

SEQ ID NO: 17382 - RNA, 22 nt, Artificial Sequence
  SAMD9L targeting guide sequence portion
ucauacccuuguuucuuaggug

SEQ ID NO: 17383 - RNA, 22 nt, Artificial Sequence
  SAMD9L targeting guide sequence portion
ucauuauuuuaaaguuuauuug

SEQ ID NO: 17384 - RNA, 22 nt, Artificial Sequence
  SAMD9L targeting guide sequence portion
uccaaaagaaaacagauuauuu

SEQ ID NO: 17385 - RNA, 22 nt, Artificial Sequence
  SAMD9L targeting guide sequence portion
uccacagcuggcuaucuuuguu

SEQ ID NO: 17386 - RNA, 22 nt, Artificial Sequence
  SAMD9L targeting guide sequence portion
uccaguuucauuauuuuaaagu

SEQ ID NO: 17387 - RNA, 22 nt, Artificial Sequence
  SAMD9L targeting guide sequence portion
ucccuuuuagcuuaacuuggug

SEQ ID NO: 17388 - RNA, 22 nt, Artificial Sequence
  SAMD9L targeting guide sequence portion
uccguagcauauaggaauauug

SEQ ID NO: 17389 - RNA, 22 nt, Artificial Sequence
  SAMD9L targeting guide sequence portion
uccuaauucauacccuuguuuc

SEQ ID NO: 17390 - RNA, 22 nt, Artificial Sequence
  SAMD9L targeting guide sequence portion
uccuauaugcuacggaaaccaa

SEQ ID NO: 17391 - RNA, 22 nt, Artificial Sequence
  SAMD9L targeting guide sequence portion
uccucaacccacuucuaccuau

SEQ ID NO: 17392 - RNA, 22 nt, Artificial Sequence
  SAMD9L targeting guide sequence portion
uccuguuccucaacccacuucu

SEQ ID NO: 17393 - RNA, 22 nt, Artificial Sequence
  SAMD9L targeting guide sequence portion
ucuaaaauacuuauuauauugc

SEQ ID NO: 17394 - RNA, 22 nt, Artificial Sequence
  SAMD9L targeting guide sequence portion
ucuaauuguaauuaugaaauaa

SEQ ID NO: 17395 - RNA, 22 nt, Artificial Sequence
  SAMD9L targeting guide sequence portion
ucuaccuauccaguuucauuau

SEQ ID NO: 17396 - RNA, 22 nt, Artificial Sequence
  SAMD9L targeting guide sequence portion
ucuaugugauuuuaaaaauaaa

SEQ ID NO: 17397 - RNA, 22 nt, Artificial Sequence
  SAMD9L targeting guide sequence portion
ucuauguuacuuaagauucugc

SEQ ID NO: 17398 - RNA, 22 nt, Artificial Sequence
  SAMD9L targeting guide sequence portion
ucucccuuuuagcuuaacuugg

SEQ ID NO: 17399 - RNA, 22 nt, Artificial Sequence
  SAMD9L targeting guide sequence portion
ucugcuuuuaagucacaaaacc

SEQ ID NO: 17400 - RNA, 22 nt, Artificial Sequence
  SAMD9L targeting guide sequence portion
ucuguaugauaauguauacaua

SEQ ID NO: 17401 - RNA, 22 nt, Artificial Sequence
  SAMD9L targeting guide sequence portion
ucuguuacuauguaacaaagau

SEQ ID NO: 17402 - RNA, 22 nt, Artificial Sequence
  SAMD9L targeting guide sequence portion
ucuguuuucuuuuggaacucaa

SEQ ID NO: 17403 - RNA, 22 nt, Artificial Sequence
  SAMD9L targeting guide sequence portion
ucuuaaaacugcuugauacuua

SEQ ID NO: 17404 - RNA, 22 nt, Artificial Sequence
  SAMD9L targeting guide sequence portion
ucuuaaguaacauagaaauugg

SEQ ID NO: 17405 - RNA, 22 nt, Artificial Sequence
  SAMD9L targeting guide sequence portion
ucuuaggugacucuaauuguaa

SEQ ID NO: 17406 - RNA, 22 nt, Artificial Sequence
  SAMD9L targeting guide sequence portion
ucuucuguaugauaauguauac

SEQ ID NO: 17407 - RNA, 22 nt, Artificial Sequence
  SAMD9L targeting guide sequence portion
ucuuuguuacauaguaacagag

SEQ ID NO: 17408 - RNA, 22 nt, Artificial Sequence
  SAMD9L targeting guide sequence portion
ugaaacuggauagguagaagug

SEQ ID NO: 17409 - RNA, 22 nt, Artificial Sequence
  SAMD9L targeting guide sequence portion
ugaaaguugggguuuugugacu

SEQ ID NO: 17410 - RNA, 22 nt, Artificial Sequence
  SAMD9L targeting guide sequence portion
ugaaauaagcuauagcugcuaa

SEQ ID NO: 17411 - RNA, 22 nt, Artificial Sequence
  SAMD9L targeting guide sequence portion
ugaauuaggaugguaaaauagc

SEQ ID NO: 17412 - RNA, 22 nt, Artificial Sequence
  SAMD9L targeting guide sequence portion
ugacacaccuuuuagccuuaua

SEQ ID NO: 17413 - RNA, 22 nt, Artificial Sequence
  SAMD9L targeting guide sequence portion
ugacucuaauuguaauuaugaa

SEQ ID NO: 17414 - RNA, 22 nt, Artificial Sequence
  SAMD9L targeting guide sequence portion
ugacucuuaaaacugcuugaua

SEQ ID NO: 17415 - RNA, 22 nt, Artificial Sequence
  SAMD9L targeting guide sequence portion
ugacuuaaaagcagaaucuuaa

SEQ ID NO: 17416 - RNA, 22 nt, Artificial Sequence
  SAMD9L targeting guide sequence portion
ugagacaaagcaauauaauaag

SEQ ID NO: 17417 - RNA, 22 nt, Artificial Sequence
  SAMD9L targeting guide sequence portion
ugaggaacaggaauccacagcu

SEQ ID NO: 17418 - RNA, 22 nt, Artificial Sequence
  SAMD9L targeting guide sequence portion
ugaguuccaaaagaaaacagau

SEQ ID NO: 17419 - RNA, 22 nt, Artificial Sequence
  SAMD9L targeting guide sequence portion
ugauaauguauacauaauuguc

SEQ ID NO: 17420 - RNA, 22 nt, Artificial Sequence
  SAMD9L targeting guide sequence portion
ugauacuuacuuuagcuauuuu

SEQ ID NO: 17421 - RNA, 22 nt, Artificial Sequence
  SAMD9L targeting guide sequence portion
ugauuuuaaaaauaaaguauaa

SEQ ID NO: 17422 - RNA, 22 nt, Artificial Sequence
  SAMD9L targeting guide sequence portion
ugcaaauaaacuuuaaaauaau

SEQ ID NO: 17423 - RNA, 22 nt, Artificial Sequence
  SAMD9L targeting guide sequence portion
ugcaauauuccuauaugcuacg

SEQ ID NO: 17424 - RNA, 22 nt, Artificial Sequence
  SAMD9L targeting guide sequence portion
ugcuaaaggcugacucuuaaaa

SEQ ID NO: 17425 - RNA, 22 nt, Artificial Sequence
  SAMD9L targeting guide sequence portion
ugcuaacuggugacacaccuuu

SEQ ID NO: 17426 - RNA, 22 nt, Artificial Sequence
  SAMD9L targeting guide sequence portion
ugcuacggaaaccaauuucuau

SEQ ID NO: 17427 - RNA, 22 nt, Artificial Sequence
  SAMD9L targeting guide sequence portion
ugcucuguuacuauguaacaaa

SEQ ID NO: 17428 - RNA, 22 nt, Artificial Sequence
  SAMD9L targeting guide sequence portion
ugcuugauacuuacuuuagcua

SEQ ID NO: 17429 - RNA, 22 nt, Artificial Sequence
  SAMD9L targeting guide sequence portion
ugcuuuuaagucacaaaacccc

SEQ ID NO: 17430 - RNA, 22 nt, Artificial Sequence
  SAMD9L targeting guide sequence portion
uggauagguagaaguggguuga

SEQ ID NO: 17431 - RNA, 22 nt, Artificial Sequence
  SAMD9L targeting guide sequence portion
uggauuccuguuccucaaccca

SEQ ID NO: 17432 - RNA, 22 nt, Artificial Sequence
  SAMD9L targeting guide sequence portion
uggcuaucuuuguuacauagua

SEQ ID NO: 17433 - RNA, 22 nt, Artificial Sequence
  SAMD9L targeting guide sequence portion
ugggguuuugugacuuaaaagc

SEQ ID NO: 17434 - RNA, 22 nt, Artificial Sequence
  SAMD9L targeting guide sequence portion
uggguugaggaacaggaaucca

SEQ ID NO: 17435 - RNA, 22 nt, Artificial Sequence
  SAMD9L targeting guide sequence portion
ugguaaaauagcuaaaguaagu

SEQ ID NO: 17436 - RNA, 22 nt, Artificial Sequence
  SAMD9L targeting guide sequence portion
uggugaaaguugggguuuugug

SEQ ID NO: 17437 - RNA, 22 nt, Artificial Sequence
  SAMD9L targeting guide sequence portion
uggugacacaccuuuuagccuu

SEQ ID NO: 17438 - RNA, 22 nt, Artificial Sequence
  SAMD9L targeting guide sequence portion
ugguuaaauaaucuguuuucuu

SEQ ID NO: 17439 - RNA, 22 nt, Artificial Sequence
  SAMD9L targeting guide sequence portion
ugguuuccguagcauauaggaa

SEQ ID NO: 17440 - RNA, 22 nt, Artificial Sequence
  SAMD9L targeting guide sequence portion
uguaacaaagauagccagcugu

SEQ ID NO: 17441 - RNA, 22 nt, Artificial Sequence
  SAMD9L targeting guide sequence portion
uguaauuaugaaauaagcuaua

SEQ ID NO: 17442 - RNA, 22 nt, Artificial Sequence
  SAMD9L targeting guide sequence portion
uguauaauauugcuaaaggcug

SEQ ID NO: 17443 - RNA, 22 nt, Artificial Sequence
  SAMD9L targeting guide sequence portion
uguauacauaauugucuaugug

SEQ ID NO: 17444 - RNA, 22 nt, Artificial Sequence
  SAMD9L targeting guide sequence portion
uguauacauuaucauacagaag

SEQ ID NO: 17445 - RNA, 22 nt, Artificial Sequence
  SAMD9L targeting guide sequence portion
uguaucuucuguaugauaaugu

SEQ ID NO: 17446 - RNA, 22 nt, Artificial Sequence
  SAMD9L targeting guide sequence portion
uguaugauaauguauacauaau

SEQ ID NO: 17447 - RNA, 22 nt, Artificial Sequence
  SAMD9L targeting guide sequence portion
ugucaccaguuagcagcuauag

SEQ ID NO: 17448 - RNA, 22 nt, Artificial Sequence
  SAMD9L targeting guide sequence portion
ugucuaugugauuuuaaaaaua

SEQ ID NO: 17449 - RNA, 22 nt, Artificial Sequence
  SAMD9L targeting guide sequence portion
ugugacuuaaaagcagaaucuu

SEQ ID NO: 17450 - RNA, 22 nt, Artificial Sequence
  SAMD9L targeting guide sequence portion
ugugauuuuaaaaauaaaguau

SEQ ID NO: 17451 - RNA, 22 nt, Artificial Sequence
  SAMD9L targeting guide sequence portion
uguggauuccuguuccucaacc

SEQ ID NO: 17452 - RNA, 22 nt, Artificial Sequence
  SAMD9L targeting guide sequence portion
ugugucaccaguuagcagcuau

SEQ ID NO: 17453 - RNA, 22 nt, Artificial Sequence
  SAMD9L targeting guide sequence portion
uguuacauaguaacagagcagu

SEQ ID NO: 17454 - RNA, 22 nt, Artificial Sequence
  SAMD9L targeting guide sequence portion
uguuacuauguaacaaagauag

SEQ ID NO: 17455 - RNA, 22 nt, Artificial Sequence
  SAMD9L targeting guide sequence portion
uguuacuuaagauucugcuuuu

SEQ ID NO: 17456 - RNA, 22 nt, Artificial Sequence
  SAMD9L targeting guide sequence portion
uguuccucaacccacuucuacc

SEQ ID NO: 17457 - RNA, 22 nt, Artificial Sequence
  SAMD9L targeting guide sequence portion
uguuucuuaggugacucuaauu

SEQ ID NO: 17458 - RNA, 22 nt, Artificial Sequence
  SAMD9L targeting guide sequence portion
uuaaaaauaaaguauaauucua

SEQ ID NO: 17459 - RNA, 22 nt, Artificial Sequence
  SAMD9L targeting guide sequence portion
uuaaaacugcuugauacuuacu

SEQ ID NO: 17460 - RNA, 22 nt, Artificial Sequence
  SAMD9L targeting guide sequence portion
uuaaaagcagaaucuuaaguaa

SEQ ID NO: 17461 - RNA, 22 nt, Artificial Sequence
  SAMD9L targeting guide sequence portion
uuaaaauaaugaaacuggauag

SEQ ID NO: 17462 - RNA, 22 nt, Artificial Sequence
  SAMD9L targeting guide sequence portion
uuaaaaucacauagacaauuau

SEQ ID NO: 17463 - RNA, 22 nt, Artificial Sequence
  SAMD9L targeting guide sequence portion
uuaaaguuuauuugcaauauuc

SEQ ID NO: 17464 - RNA, 22 nt, Artificial Sequence
  SAMD9L targeting guide sequence portion
uuaaauaaucuguuuucuuuug

SEQ ID NO: 17465 - RNA, 22 nt, Artificial Sequence
  SAMD9L targeting guide sequence portion
uuaaccaacugcucuguuacua

SEQ ID NO: 17466 - RNA, 22 nt, Artificial Sequence
  SAMD9L targeting guide sequence portion
uuaacuuggugaaaguuggggu

SEQ ID NO: 17467 - RNA, 22 nt, Artificial Sequence
  SAMD9L targeting guide sequence portion
uuaagagucagccuuuagcaau

SEQ ID NO: 17468 - RNA, 22 nt, Artificial Sequence
  SAMD9L targeting guide sequence portion
uuaagauucugcuuuuaaguca

SEQ ID NO: 17469 - RNA, 22 nt, Artificial Sequence
  SAMD9L targeting guide sequence portion
uuaagcuaaaagggagaauuau

SEQ ID NO: 17470 - RNA, 22 nt, Artificial Sequence
  SAMD9L targeting guide sequence portion
uuaaguaacauagaaauugguu

SEQ ID NO: 17471 - RNA, 22 nt, Artificial Sequence
  SAMD9L targeting guide sequence portion
uuaagucacaaaaccccaacuu

SEQ ID NO: 17472 - RNA, 22 nt, Artificial Sequence
  SAMD9L targeting guide sequence portion
uuacaauuagagucaccuaaga

SEQ ID NO: 17473 - RNA, 22 nt, Artificial Sequence
  SAMD9L targeting guide sequence portion
uuacauaguaacagagcaguug

SEQ ID NO: 17474 - RNA, 22 nt, Artificial Sequence
  SAMD9L targeting guide sequence portion
uuaccauccuaauucauacccu

SEQ ID NO: 17475 - RNA, 22 nt, Artificial Sequence
  SAMD9L targeting guide sequence portion
uuacuauguaacaaagauagcc

SEQ ID NO: 17476 - RNA, 22 nt, Artificial Sequence
  SAMD9L targeting guide sequence portion
uuacuuaagauucugcuuuuaa

SEQ ID NO: 17477 - RNA, 22 nt, Artificial Sequence
  SAMD9L targeting guide sequence portion
uuacuuuagcuauuuuaccauc

SEQ ID NO: 17478 - RNA, 22 nt, Artificial Sequence
  SAMD9L targeting guide sequence portion
uuagaauuauacuuuauuuuua

SEQ ID NO: 17479 - RNA, 22 nt, Artificial Sequence
  SAMD9L targeting guide sequence portion
uuagagucaccuaagaaacaag

SEQ ID NO: 17480 - RNA, 22 nt, Artificial Sequence
  SAMD9L targeting guide sequence portion
uuagcaauauuauacauauaua

SEQ ID NO: 17481 - RNA, 22 nt, Artificial Sequence
  SAMD9L targeting guide sequence portion
uuagcagcuauagcuuauuuca

SEQ ID NO: 17482 - RNA, 22 nt, Artificial Sequence
  SAMD9L targeting guide sequence portion
uuagccuuauaauaauucuccc

SEQ ID NO: 17483 - RNA, 22 nt, Artificial Sequence
  SAMD9L targeting guide sequence portion
uuagcuauuuuaccauccuaau

SEQ ID NO: 17484 - RNA, 22 nt, Artificial Sequence
  SAMD9L targeting guide sequence portion
uuagcuuaacuuggugaaaguu

SEQ ID NO: 17485 - RNA, 22 nt, Artificial Sequence
  SAMD9L targeting guide sequence portion
uuaggaugguaaaauagcuaaa

SEQ ID NO: 17486 - RNA, 22 nt, Artificial Sequence
  SAMD9L targeting guide sequence portion
uuaggugacucuaauuguaauu

SEQ ID NO: 17487 - RNA, 22 nt, Artificial Sequence
  SAMD9L targeting guide sequence portion
uuauaaggcuaaaagguguguc

SEQ ID NO: 17488 - RNA, 22 nt, Artificial Sequence
  SAMD9L targeting guide sequence portion
uuauaauaauucucccuuuuag

SEQ ID NO: 17489 - RNA, 22 nt, Artificial Sequence
  SAMD9L targeting guide sequence portion
uuauacauauauauauguaucu

SEQ ID NO: 17490 - RNA, 22 nt, Artificial Sequence
  SAMD9L targeting guide sequence portion
uuauacuuuauuuuuaaaauca

SEQ ID NO: 17491 - RNA, 22 nt, Artificial Sequence
  SAMD9L targeting guide sequence portion
uuaucauacagaagauacauau

SEQ ID NO: 17492 - RNA, 22 nt, Artificial Sequence
  SAMD9L targeting guide sequence portion
uuaugaaauaagcuauagcugc

SEQ ID NO: 17493 - RNA, 22 nt, Artificial Sequence
  SAMD9L targeting guide sequence portion
uuauguauacauuaucauacag

SEQ ID NO: 17494 - RNA, 22 nt, Artificial Sequence
  SAMD9L targeting guide sequence portion
uuauuauaaggcuaaaaggugu

SEQ ID NO: 17495 - RNA, 22 nt, Artificial Sequence
  SAMD9L targeting guide sequence portion
uuauuuaaccaacugcucuguu

SEQ ID NO: 17496 - RNA, 22 nt, Artificial Sequence
  SAMD9L targeting guide sequence portion
uuauuucauaauuacaauuaga

SEQ ID NO: 17497 - RNA, 22 nt, Artificial Sequence
  SAMD9L targeting guide sequence portion
uuauuugcaauauuccuauaug

SEQ ID NO: 17498 - RNA, 22 nt, Artificial Sequence
  SAMD9L targeting guide sequence portion
uuauuuuaaaguuuauuugcaa

SEQ ID NO: 17499 - RNA, 22 nt, Artificial Sequence
  SAMD9L targeting guide sequence portion
uuauuuuuaaaaucacauagac

SEQ ID NO: 17500 - RNA, 22 nt, Artificial Sequence
  SAMD9L targeting guide sequence portion
uucaccaaguuaagcuaaaagg

SEQ ID NO: 17501 - RNA, 22 nt, Artificial Sequence
  SAMD9L targeting guide sequence portion
uucauaauuacaauuagaguca

SEQ ID NO: 17502 - RNA, 22 nt, Artificial Sequence
  SAMD9L targeting guide sequence portion
uucauacccuuguuucuuaggu

SEQ ID NO: 17503 - RNA, 22 nt, Artificial Sequence
  SAMD9L targeting guide sequence portion
uucauuauuuuaaaguuuauuu

SEQ ID NO: 17504 - RNA, 22 nt, Artificial Sequence
  SAMD9L targeting guide sequence portion
uuccaaaagaaaacagauuauu

SEQ ID NO: 17505 - RNA, 22 nt, Artificial Sequence
  SAMD9L targeting guide sequence portion
uuccguagcauauaggaauauu

SEQ ID NO: 17506 - RNA, 22 nt, Artificial Sequence
  SAMD9L targeting guide sequence portion
uuccuauaugcuacggaaacca

SEQ ID NO: 17507 - RNA, 22 nt, Artificial Sequence
  SAMD9L targeting guide sequence portion
uuccucaacccacuucuaccua

SEQ ID NO: 17508 - RNA, 22 nt, Artificial Sequence
  SAMD9L targeting guide sequence portion
uuccuguuccucaacccacuuc

SEQ ID NO: 17509 - RNA, 22 nt, Artificial Sequence
  SAMD9L targeting guide sequence portion
uucuaaaauacuuauuauauug

SEQ ID NO: 17510 - RNA, 22 nt, Artificial Sequence
  SAMD9L targeting guide sequence portion
uucuaccuauccaguuucauua

SEQ ID NO: 17511 - RNA, 22 nt, Artificial Sequence
  SAMD9L targeting guide sequence portion
uucuauguuacuuaagauucug

SEQ ID NO: 17512 - RNA, 22 nt, Artificial Sequence
  SAMD9L targeting guide sequence portion
uucucccuuuuagcuuaacuug

SEQ ID NO: 17513 - RNA, 22 nt, Artificial Sequence
  SAMD9L targeting guide sequence portion
uucugcuuuuaagucacaaaac

SEQ ID NO: 17514 - RNA, 22 nt, Artificial Sequence
  SAMD9L targeting guide sequence portion
uucuguaugauaauguauacau

SEQ ID NO: 17515 - RNA, 22 nt, Artificial Sequence
  SAMD9L targeting guide sequence portion
uucuuaggugacucuaauugua

SEQ ID NO: 17516 - RNA, 22 nt, Artificial Sequence
  SAMD9L targeting guide sequence portion
uugaggaacaggaauccacagc

SEQ ID NO: 17517 - RNA, 22 nt, Artificial Sequence
  SAMD9L targeting guide sequence portion
uugaguuccaaaagaaaacaga

SEQ ID NO: 17518 - RNA, 22 nt, Artificial Sequence
  SAMD9L targeting guide sequence portion
uugauacuuacuuuagcuauuu

SEQ ID NO: 17519 - RNA, 22 nt, Artificial Sequence
  SAMD9L targeting guide sequence portion
uugcaaauaaacuuuaaaauaa

SEQ ID NO: 17520 - RNA, 22 nt, Artificial Sequence
  SAMD9L targeting guide sequence portion
uugcaauauuccuauaugcuac

SEQ ID NO: 17521 - RNA, 22 nt, Artificial Sequence
  SAMD9L targeting guide sequence portion
uugcuaaaggcugacucuuaaa

SEQ ID NO: 17522 - RNA, 22 nt, Artificial Sequence
  SAMD9L targeting guide sequence portion
uugggguuuugugacuuaaaag

SEQ ID NO: 17523 - RNA, 22 nt, Artificial Sequence
  SAMD9L targeting guide sequence portion
uuggugaaaguugggguuuugu

SEQ ID NO: 17524 - RNA, 22 nt, Artificial Sequence
  SAMD9L targeting guide sequence portion
uugguuaaauaaucuguuuucu

SEQ ID NO: 17525 - RNA, 22 nt, Artificial Sequence
  SAMD9L targeting guide sequence portion
uugguuuccguagcauauagga

SEQ ID NO: 17526 - RNA, 22 nt, Artificial Sequence
  SAMD9L targeting guide sequence portion
uuguaauuaugaaauaagcuau

SEQ ID NO: 17527 - RNA, 22 nt, Artificial Sequence
  SAMD9L targeting guide sequence portion
uugucuaugugauuuuaaaaau

SEQ ID NO: 17528 - RNA, 22 nt, Artificial Sequence
  SAMD9L targeting guide sequence portion
uugugacuuaaaagcagaaucu

SEQ ID NO: 17529 - RNA, 22 nt, Artificial Sequence
  SAMD9L targeting guide sequence portion
uuguuacauaguaacagagcag

SEQ ID NO: 17530 - RNA, 22 nt, Artificial Sequence
  SAMD9L targeting guide sequence portion
uuguuucuuaggugacucuaau

SEQ ID NO: 17531 - RNA, 22 nt, Artificial Sequence
  SAMD9L targeting guide sequence portion
uuuaaaaauaaaguauaauucu

SEQ ID NO: 17532 - RNA, 22 nt, Artificial Sequence
  SAMD9L targeting guide sequence portion
uuuaaaauaaugaaacuggaua

SEQ ID NO: 17533 - RNA, 22 nt, Artificial Sequence
  SAMD9L targeting guide sequence portion
uuuaaaaucacauagacaauua

SEQ ID NO: 17534 - RNA, 22 nt, Artificial Sequence
  SAMD9L targeting guide sequence portion
uuuaaaguuuauuugcaauauu

SEQ ID NO: 17535 - RNA, 22 nt, Artificial Sequence
  SAMD9L targeting guide sequence portion
uuuaaccaacugcucuguuacu

SEQ ID NO: 17536 - RNA, 22 nt, Artificial Sequence
  SAMD9L targeting guide sequence portion
uuuaagagucagccuuuagcaa

SEQ ID NO: 17537 - RNA, 22 nt, Artificial Sequence
  SAMD9L targeting guide sequence portion
uuuaagucacaaaaccccaacu

SEQ ID NO: 17538 - RNA, 22 nt, Artificial Sequence
  SAMD9L targeting guide sequence portion
uuuaccauccuaauucauaccc

SEQ ID NO: 17539 - RNA, 22 nt, Artificial Sequence
  SAMD9L targeting guide sequence portion
uuuagaauuauacuuuauuuuu

SEQ ID NO: 17540 - RNA, 22 nt, Artificial Sequence
  SAMD9L targeting guide sequence portion
uuuagcaauauuauacauauau

SEQ ID NO: 17541 - RNA, 22 nt, Artificial Sequence
  SAMD9L targeting guide sequence portion
uuuagcuauuuuaccauccuaa

SEQ ID NO: 17542 - RNA, 22 nt, Artificial Sequence
  SAMD9L targeting guide sequence portion
uuuagcuuaacuuggugaaagu

SEQ ID NO: 17543 - RNA, 22 nt, Artificial Sequence
  SAMD9L targeting guide sequence portion
uuuauuugcaauauuccuauau

SEQ ID NO: 17544 - RNA, 22 nt, Artificial Sequence
  SAMD9L targeting guide sequence portion
uuuauuuuuaaaaucacauaga

SEQ ID NO: 17545 - RNA, 22 nt, Artificial Sequence
  SAMD9L targeting guide sequence portion
uuucaccaaguuaagcuaaaag

SEQ ID NO: 17546 - RNA, 22 nt, Artificial Sequence
  SAMD9L targeting guide sequence portion
uuucauaauuacaauuagaguc

SEQ ID NO: 17547 - RNA, 22 nt, Artificial Sequence
  SAMD9L targeting guide sequence portion
uuucauuauuuuaaaguuuauu

SEQ ID NO: 17548 - RNA, 22 nt, Artificial Sequence
  SAMD9L targeting guide sequence portion
uuuccguagcauauaggaauau

SEQ ID NO: 17549 - RNA, 22 nt, Artificial Sequence
  SAMD9L targeting guide sequence portion
uuucuauguuacuuaagauucu

SEQ ID NO: 17550 - RNA, 22 nt, Artificial Sequence
  SAMD9L targeting guide sequence portion
uuucuuaggugacucuaauugu

SEQ ID NO: 17551 - RNA, 22 nt, Artificial Sequence
  SAMD9L targeting guide sequence portion
uuugcaauauuccuauaugcua

SEQ ID NO: 17552 - RNA, 22 nt, Artificial Sequence
  SAMD9L targeting guide sequence portion
uuugugacuuaaaagcagaauc

SEQ ID NO: 17553 - RNA, 22 nt, Artificial Sequence
  SAMD9L targeting guide sequence portion
uuuguuacauaguaacagagca

SEQ ID NO: 17554 - RNA, 22 nt, Artificial Sequence
  SAMD9L targeting guide sequence portion
uuuuaaaaauaaaguauaauuc

SEQ ID NO: 17555 - RNA, 22 nt, Artificial Sequence
  SAMD9L targeting guide sequence portion
uuuuaaaaucacauagacaauu

SEQ ID NO: 17556 - RNA, 22 nt, Artificial Sequence
  SAMD9L targeting guide sequence portion
uuuuaaaguuuauuugcaauau

SEQ ID NO: 17557 - RNA, 22 nt, Artificial Sequence
  SAMD9L targeting guide sequence portion
uuuuaagagucagccuuuagca

SEQ ID NO: 17558 - RNA, 22 nt, Artificial Sequence
  SAMD9L targeting guide sequence portion
uuuuaagucacaaaaccccaac

SEQ ID NO: 17559 - RNA, 22 nt, Artificial Sequence
  SAMD9L targeting guide sequence portion
uuuuaccauccuaauucauacc

SEQ ID NO: 17560 - RNA, 22 nt, Artificial Sequence
  SAMD9L targeting guide sequence portion
uuuuagaauuauacuuuauuuu

SEQ ID NO: 17561 - RNA, 22 nt, Artificial Sequence
  SAMD9L targeting guide sequence portion
uuuuagccuuauaauaauucuc

SEQ ID NO: 17562 - RNA, 22 nt, Artificial Sequence
  SAMD9L targeting guide sequence portion
uuuuagcuuaacuuggugaaag

SEQ ID NO: 17563 - RNA, 22 nt, Artificial Sequence
  SAMD9L targeting guide sequence portion
uuuugugacuuaaaagcagaau

SEQ ID NO: 17564 - RNA, 22 nt, Artificial Sequence
  SAMD9L targeting guide sequence portion
uuuuuaaaaucacauagacaau

SEQ ID NO: 17565 - RNA, 20 nt, Artificial Sequence
  SAMD9L targeting guide sequence portion
aaaaaauaagccaggggaga

SEQ ID NO: 17566 - RNA, 20 nt, Artificial Sequence
  SAMD9L targeting guide sequence portion
aaaaauaagccaggggagau

SEQ ID NO: 17567 - RNA, 20 nt, Artificial Sequence
  SAMD9L targeting guide sequence portion
aaaaauggcuuaaaggaaga

SEQ ID NO: 17568 - RNA, 20 nt, Artificial Sequence
  SAMD9L targeting guide sequence portion
aaaacuugagaacacauauu

SEQ ID NO: 17569 - RNA, 20 nt, Artificial Sequence
  SAMD9L targeting guide sequence portion
aaaauaagccaggggagaug

SEQ ID NO: 17570 - RNA, 20 nt, Artificial Sequence
  SAMD9L targeting guide sequence portion
aaaauggcuuaaaggaagag

SEQ ID NO: 17571 - RNA, 20 nt, Artificial Sequence
  SAMD9L targeting guide sequence portion
aaacagguggagauaaggcu

SEQ ID NO: 17572 - RNA, 20 nt, Artificial Sequence
  SAMD9L targeting guide sequence portion
aaacauaggcuaauauagau

SEQ ID NO: 17573 - RNA, 20 nt, Artificial Sequence
  SAMD9L targeting guide sequence portion
aaacuugagaacacauauua

SEQ ID NO: 17574 - RNA, 20 nt, Artificial Sequence
  SAMD9L targeting guide sequence portion
aaagaggguaaugaauggaa

SEQ ID NO: 17575 - RNA, 20 nt, Artificial Sequence
  SAMD9L targeting guide sequence portion
aaaggaagagauucaccugu

SEQ ID NO: 17576 - RNA, 20 nt, Artificial Sequence
  SAMD9L targeting guide sequence portion
aaagggaacaaagaggguaa

SEQ ID NO: 17577 - RNA, 20 nt, Artificial Sequence
  SAMD9L targeting guide sequence portion
aaagugaaacauaggcuaau

SEQ ID NO: 17578 - RNA, 20 nt, Artificial Sequence
  SAMD9L targeting guide sequence portion
aaauaagccaggggagaugg

SEQ ID NO: 17579 - RNA, 20 nt, Artificial Sequence
  SAMD9L targeting guide sequence portion
aaauaaggcaaucucaacag

SEQ ID NO: 17580 - RNA, 20 nt, Artificial Sequence
  SAMD9L targeting guide sequence portion
aaaucagaauagcaggagag

SEQ ID NO: 17581 - RNA, 20 nt, Artificial Sequence
  SAMD9L targeting guide sequence portion
aaaucaguugugaaugacaa

SEQ ID NO: 17582 - RNA, 20 nt, Artificial Sequence
  SAMD9L targeting guide sequence portion
aaauggcuuaaaggaagaga

SEQ ID NO: 17583 - RNA, 20 nt, Artificial Sequence
  SAMD9L targeting guide sequence portion
aaauugaauauugaauaaaa

SEQ ID NO: 17584 - RNA, 20 nt, Artificial Sequence
  SAMD9L targeting guide sequence portion
aacaaagaggguaaugaaug

SEQ ID NO: 17585 - RNA, 20 nt, Artificial Sequence
  SAMD9L targeting guide sequence portion
aacacauauuaccaugagga

SEQ ID NO: 17586 - RNA, 20 nt, Artificial Sequence
  SAMD9L targeting guide sequence portion
aacagagagaacagcaugua

SEQ ID NO: 17587 - RNA, 20 nt, Artificial Sequence
  SAMD9L targeting guide sequence portion
aacagcauguauauagcaca

SEQ ID NO: 17588 - RNA, 20 nt, Artificial Sequence
  SAMD9L targeting guide sequence portion
aacagccagaacagucucaa

SEQ ID NO: 17589 - RNA, 20 nt, Artificial Sequence
  SAMD9L targeting guide sequence portion
aacagguggagauaaggcug

SEQ ID NO: 17590 - RNA, 20 nt, Artificial Sequence
  SAMD9L targeting guide sequence portion
aacagucucaagcagcauuc

SEQ ID NO: 17591 - RNA, 20 nt, Artificial Sequence
  SAMD9L targeting guide sequence portion
aacauaggcuaauauagauu

SEQ ID NO: 17592 - RNA, 20 nt, Artificial Sequence
  SAMD9L targeting guide sequence portion
aacauucucucuccugcuau

SEQ ID NO: 17593 - RNA, 20 nt, Artificial Sequence
  SAMD9L targeting guide sequence portion
aaccugugcuauauacaugc

SEQ ID NO: 17594 - RNA, 20 nt, Artificial Sequence
  SAMD9L targeting guide sequence portion
aacuacgcauugccuauaaa

SEQ ID NO: 17595 - RNA, 20 nt, Artificial Sequence
  SAMD9L targeting guide sequence portion
aacugauuucaagagucacc

SEQ ID NO: 17596 - RNA, 20 nt, Artificial Sequence
  SAMD9L targeting guide sequence portion
aacuugagaacacauauuac

SEQ ID NO: 17597 - RNA, 20 nt, Artificial Sequence
  SAMD9L targeting guide sequence portion
aagaaacagguggagauaag

SEQ ID NO: 17598 - RNA, 20 nt, Artificial Sequence
  SAMD9L targeting guide sequence portion
aagaacuacgcauugccuau

SEQ ID NO: 17599 - RNA, 20 nt, Artificial Sequence
  SAMD9L targeting guide sequence portion
aagacuuccuggugaaggug

SEQ ID NO: 17600 - RNA, 20 nt, Artificial Sequence
  SAMD9L targeting guide sequence portion
aagagauucaccuguaaaug

SEQ ID NO: 17601 - RNA, 20 nt, Artificial Sequence
  SAMD9L targeting guide sequence portion
aagaggguaaugaauggaaa

SEQ ID NO: 17602 - RNA, 20 nt, Artificial Sequence
  SAMD9L targeting guide sequence portion
aagagucaccuucaccagga

SEQ ID NO: 17603 - RNA, 20 nt, Artificial Sequence
  SAMD9L targeting guide sequence portion
aagccaggggagaugggauc

SEQ ID NO: 17604 - RNA, 20 nt, Artificial Sequence
  SAMD9L targeting guide sequence portion
aagccauuuuugucuccugu

SEQ ID NO: 17605 - RNA, 20 nt, Artificial Sequence
  SAMD9L targeting guide sequence portion
aagcccucuaaucaggcagg

SEQ ID NO: 17606 - RNA, 20 nt, Artificial Sequence
  SAMD9L targeting guide sequence portion
aagcucauucucagaugcac

SEQ ID NO: 17607 - RNA, 20 nt, Artificial Sequence
  SAMD9L targeting guide sequence portion
aaggaagacuuccuggugaa

SEQ ID NO: 17608 - RNA, 20 nt, Artificial Sequence
  SAMD9L targeting guide sequence portion
aaggaagagauucaccugua

SEQ ID NO: 17609 - RNA, 20 nt, Artificial Sequence
  SAMD9L targeting guide sequence portion
aaggaaugccaucccagaag

SEQ ID NO: 17610 - RNA, 20 nt, Artificial Sequence
  SAMD9L targeting guide sequence portion
aaggcaaucucaacagagag

SEQ ID NO: 17611 - RNA, 20 nt, Artificial Sequence
  SAMD9L targeting guide sequence portion
aaggcuguauucacaggaga

SEQ ID NO: 17612 - RNA, 20 nt, Artificial Sequence
  SAMD9L targeting guide sequence portion
aagggaacaaagaggguaau

SEQ ID NO: 17613 - RNA, 20 nt, Artificial Sequence
  SAMD9L targeting guide sequence portion
aaggugacucuugaaaucag

SEQ ID NO: 17614 - RNA, 20 nt, Artificial Sequence
  SAMD9L targeting guide sequence portion
aaguaaagggaacaaagagg

SEQ ID NO: 17615 - RNA, 20 nt, Artificial Sequence
  SAMD9L targeting guide sequence portion
aagucuuccuugaccaccau

SEQ ID NO: 17616 - RNA, 20 nt, Artificial Sequence
  SAMD9L targeting guide sequence portion
aagugaaacauaggcuaaua

SEQ ID NO: 17617 - RNA, 20 nt, Artificial Sequence
  SAMD9L targeting guide sequence portion
aaguuuucagugucaaggaa

SEQ ID NO: 17618 - RNA, 20 nt, Artificial Sequence
  SAMD9L targeting guide sequence portion
aauaagccaggggagauggg

SEQ ID NO: 17619 - RNA, 20 nt, Artificial Sequence
  SAMD9L targeting guide sequence portion
aauaaggcaaucucaacaga

SEQ ID NO: 17620 - RNA, 20 nt, Artificial Sequence
  SAMD9L targeting guide sequence portion
aauacagccuuaucuccacc

SEQ ID NO: 17621 - RNA, 20 nt, Artificial Sequence
  SAMD9L targeting guide sequence portion
aauagcaggagagagaaugu

SEQ ID NO: 17622 - RNA, 20 nt, Artificial Sequence
  SAMD9L targeting guide sequence portion
aauauagauuaaauugaaua

SEQ ID NO: 17623 - RNA, 20 nt, Artificial Sequence
  SAMD9L targeting guide sequence portion
aauauguguucucaaguuuu

SEQ ID NO: 17624 - RNA, 20 nt, Artificial Sequence
  SAMD9L targeting guide sequence portion
aauauucaauuuaaucuaua

SEQ ID NO: 17625 - RNA, 20 nt, Artificial Sequence
  SAMD9L targeting guide sequence portion
aaucagaauagcaggagaga

SEQ ID NO: 17626 - RNA, 20 nt, Artificial Sequence
  SAMD9L targeting guide sequence portion
aaucaggcaggaaugauggu

SEQ ID NO: 17627 - RNA, 20 nt, Artificial Sequence
  SAMD9L targeting guide sequence portion
aaucaguugugaaugacaaa

SEQ ID NO: 17628 - RNA, 20 nt, Artificial Sequence
  SAMD9L targeting guide sequence portion
aaucuauauuagccuauguu

SEQ ID NO: 17629 - RNA, 20 nt, Artificial Sequence
  SAMD9L targeting guide sequence portion
aaucucaacagagagaacag

SEQ ID NO: 17630 - RNA, 20 nt, Artificial Sequence
  SAMD9L targeting guide sequence portion
aaucucuuccuuuaagccau

SEQ ID NO: 17631 - RNA, 20 nt, Artificial Sequence
  SAMD9L targeting guide sequence portion
aaugaauggaaaaaauaagc

SEQ ID NO: 17632 - RNA, 20 nt, Artificial Sequence
  SAMD9L targeting guide sequence portion
aaugacaaaucagaauagca

SEQ ID NO: 17633 - RNA, 20 nt, Artificial Sequence
  SAMD9L targeting guide sequence portion
aaugagcuucugggauggca

SEQ ID NO: 17634 - RNA, 20 nt, Artificial Sequence
  SAMD9L targeting guide sequence portion
aaugaugguggucaaggaag

SEQ ID NO: 17635 - RNA, 20 nt, Artificial Sequence
  SAMD9L targeting guide sequence portion
aaugccaucccagaagcuca

SEQ ID NO: 17636 - RNA, 20 nt, Artificial Sequence
  SAMD9L targeting guide sequence portion
aaugcugcuugagacuguuc

SEQ ID NO: 17637 - RNA, 20 nt, Artificial Sequence
  SAMD9L targeting guide sequence portion
aauggaaaaaauaagccagg

SEQ ID NO: 17638 - RNA, 20 nt, Artificial Sequence
  SAMD9L targeting guide sequence portion
aauggcuuaaaggaagagau

SEQ ID NO: 17639 - RNA, 20 nt, Artificial Sequence
  SAMD9L targeting guide sequence portion
aauguuagauggaaauaagg

SEQ ID NO: 17640 - RNA, 20 nt, Artificial Sequence
  SAMD9L targeting guide sequence portion
aauuuaagaacuacgcauug

SEQ ID NO: 17641 - RNA, 20 nt, Artificial Sequence
  SAMD9L targeting guide sequence portion
aauuuaaucuauauuagccu

SEQ ID NO: 17642 - RNA, 20 nt, Artificial Sequence
  SAMD9L targeting guide sequence portion
acaaaaauggcuuaaaggaa

SEQ ID NO: 17643 - RNA, 20 nt, Artificial Sequence
  SAMD9L targeting guide sequence portion
acaaagaggguaaugaaugg

SEQ ID NO: 17644 - RNA, 20 nt, Artificial Sequence
  SAMD9L targeting guide sequence portion
acaaaucagaauagcaggag

SEQ ID NO: 17645 - RNA, 20 nt, Artificial Sequence
  SAMD9L targeting guide sequence portion
acaacagccagaacagucuc

SEQ ID NO: 17646 - RNA, 20 nt, Artificial Sequence
  SAMD9L targeting guide sequence portion
acaacugauuucaagaguca

SEQ ID NO: 17647 - RNA, 20 nt, Artificial Sequence
  SAMD9L targeting guide sequence portion
acacauauuaccaugaggaa

SEQ ID NO: 17648 - RNA, 20 nt, Artificial Sequence
  SAMD9L targeting guide sequence portion
acacugaaaacuugagaaca

SEQ ID NO: 17649 - RNA, 20 nt, Artificial Sequence
  SAMD9L targeting guide sequence portion
acagagagaacagcauguau

SEQ ID NO: 17650 - RNA, 20 nt, Artificial Sequence
  SAMD9L targeting guide sequence portion
acagcauguauauagcacag

SEQ ID NO: 17651 - RNA, 20 nt, Artificial Sequence
  SAMD9L targeting guide sequence portion
acagccagaacagucucaag

SEQ ID NO: 17652 - RNA, 20 nt, Artificial Sequence
  SAMD9L targeting guide sequence portion
acagccuuaucuccaccugu

SEQ ID NO: 17653 - RNA, 20 nt, Artificial Sequence
  SAMD9L targeting guide sequence portion
acaggagacaaaaauggcuu

SEQ ID NO: 17654 - RNA, 20 nt, Artificial Sequence
  SAMD9L targeting guide sequence portion
acaggugaaucucuuccuuu

SEQ ID NO: 17655 - RNA, 20 nt, Artificial Sequence
  SAMD9L targeting guide sequence portion
acagguggagauaaggcugu

SEQ ID NO: 17656 - RNA, 20 nt, Artificial Sequence
  SAMD9L targeting guide sequence portion
acagguugagaaguaaaggg

SEQ ID NO: 17657 - RNA, 20 nt, Artificial Sequence
  SAMD9L targeting guide sequence portion
acauaggcuaauauagauua

SEQ ID NO: 17658 - RNA, 20 nt, Artificial Sequence
  SAMD9L targeting guide sequence portion
acauauuaccaugaggaagc

SEQ ID NO: 17659 - RNA, 20 nt, Artificial Sequence
  SAMD9L targeting guide sequence portion
acaugcuguucucucuguug

SEQ ID NO: 17660 - RNA, 20 nt, Artificial Sequence
  SAMD9L targeting guide sequence portion
acauucucucuccugcuauu

SEQ ID NO: 17661 - RNA, 20 nt, Artificial Sequence
  SAMD9L targeting guide sequence portion
accaccaucauuccugccug

SEQ ID NO: 17662 - RNA, 20 nt, Artificial Sequence
  SAMD9L targeting guide sequence portion
accaggaagucuuccuugac

SEQ ID NO: 17663 - RNA, 20 nt, Artificial Sequence
  SAMD9L targeting guide sequence portion
accaucauuccugccugauu

SEQ ID NO: 17664 - RNA, 20 nt, Artificial Sequence
  SAMD9L targeting guide sequence portion
accaugaggaagcccucuaa

SEQ ID NO: 17665 - RNA, 20 nt, Artificial Sequence
  SAMD9L targeting guide sequence portion
acccucuuuguucccuuuac

SEQ ID NO: 17666 - RNA, 20 nt, Artificial Sequence
  SAMD9L targeting guide sequence portion
accugugcuauauacaugcu

SEQ ID NO: 17667 - RNA, 20 nt, Artificial Sequence
  SAMD9L targeting guide sequence portion
accuguuucuuagaucccau

SEQ ID NO: 17668 - RNA, 20 nt, Artificial Sequence
  SAMD9L targeting guide sequence portion
accuucaccaggaagucuuc

SEQ ID NO: 17669 - RNA, 20 nt, Artificial Sequence
  SAMD9L targeting guide sequence portion
acgcauugccuauaaaguga

SEQ ID NO: 17670 - RNA, 20 nt, Artificial Sequence
  SAMD9L targeting guide sequence portion
acuacgcauugccuauaaag

SEQ ID NO: 17671 - RNA, 20 nt, Artificial Sequence
  SAMD9L targeting guide sequence portion
acucuugaaaucaguuguga

SEQ ID NO: 17672 - RNA, 20 nt, Artificial Sequence
  SAMD9L targeting guide sequence portion
acugaaaacuugagaacaca

SEQ ID NO: 17673 - RNA, 20 nt, Artificial Sequence
  SAMD9L targeting guide sequence portion
acugauuucaagagucaccu

SEQ ID NO: 17674 - RNA, 20 nt, Artificial Sequence
  SAMD9L targeting guide sequence portion
acuguucuggcuguugugca

SEQ ID NO: 17675 - RNA, 20 nt, Artificial Sequence
  SAMD9L targeting guide sequence portion
acuuccuggugaaggugacu

SEQ ID NO: 17676 - RNA, 20 nt, Artificial Sequence
  SAMD9L targeting guide sequence portion
acuucucaaccugugcuaua

SEQ ID NO: 17677 - RNA, 20 nt, Artificial Sequence
  SAMD9L targeting guide sequence portion
acuugagaacacauauuacc

SEQ ID NO: 17678 - RNA, 20 nt, Artificial Sequence
  SAMD9L targeting guide sequence portion
acuuuauaggcaaugcguag

SEQ ID NO: 17679 - RNA, 20 nt, Artificial Sequence
  SAMD9L targeting guide sequence portion
agaaacagguggagauaagg

SEQ ID NO: 17680 - RNA, 20 nt, Artificial Sequence
  SAMD9L targeting guide sequence portion
agaacacauauuaccaugag

SEQ ID NO: 17681 - RNA, 20 nt, Artificial Sequence
  SAMD9L targeting guide sequence portion
agaacagcauguauauagca

SEQ ID NO: 17682 - RNA, 20 nt, Artificial Sequence
  SAMD9L targeting guide sequence portion
agaacagucucaagcagcau

SEQ ID NO: 17683 - RNA, 20 nt, Artificial Sequence
  SAMD9L targeting guide sequence portion
agaacuacgcauugccuaua

SEQ ID NO: 17684 - RNA, 20 nt, Artificial Sequence
  SAMD9L targeting guide sequence portion
agaagcucauucucagaugc

SEQ ID NO: 17685 - RNA, 20 nt, Artificial Sequence
  SAMD9L targeting guide sequence portion
agaaguaaagggaacaaaga

SEQ ID NO: 17686 - RNA, 20 nt, Artificial Sequence
  SAMD9L targeting guide sequence portion
agaauagcaggagagagaau

SEQ ID NO: 17687 - RNA, 20 nt, Artificial Sequence
  SAMD9L targeting guide sequence portion
agaaugagcuucugggaugg

SEQ ID NO: 17688 - RNA, 20 nt, Artificial Sequence
  SAMD9L targeting guide sequence portion
agaaugcugcuugagacugu

SEQ ID NO: 17689 - RNA, 20 nt, Artificial Sequence
  SAMD9L targeting guide sequence portion
agaauguuagauggaaauaa

SEQ ID NO: 17690 - RNA, 20 nt, Artificial Sequence
  SAMD9L targeting guide sequence portion
agacaaaaauggcuuaaagg

SEQ ID NO: 17691 - RNA, 20 nt, Artificial Sequence
  SAMD9L targeting guide sequence portion
agacuguucuggcuguugug

SEQ ID NO: 17692 - RNA, 20 nt, Artificial Sequence
  SAMD9L targeting guide sequence portion
agacuuccuggugaagguga

SEQ ID NO: 17693 - RNA, 20 nt, Artificial Sequence
  SAMD9L targeting guide sequence portion
agagaacagcauguauauag

SEQ ID NO: 17694 - RNA, 20 nt, Artificial Sequence
  SAMD9L targeting guide sequence portion
agagaauguuagauggaaau

SEQ ID NO: 17695 - RNA, 20 nt, Artificial Sequence
  SAMD9L targeting guide sequence portion
agagagaacagcauguauau

SEQ ID NO: 17696 - RNA, 20 nt, Artificial Sequence
  SAMD9L targeting guide sequence portion
agagagaauguuagauggaa

SEQ ID NO: 17697 - RNA, 20 nt, Artificial Sequence
  SAMD9L targeting guide sequence portion
agagauucaccuguaaaugg

SEQ ID NO: 17698 - RNA, 20 nt, Artificial Sequence
  SAMD9L targeting guide sequence portion
agagggcuuccucaugguaa

SEQ ID NO: 17699 - RNA, 20 nt, Artificial Sequence
  SAMD9L targeting guide sequence portion
agaggguaaugaauggaaaa

SEQ ID NO: 17700 - RNA, 20 nt, Artificial Sequence
  SAMD9L targeting guide sequence portion
agagucaccuucaccaggaa

SEQ ID NO: 17701 - RNA, 20 nt, Artificial Sequence
  SAMD9L targeting guide sequence portion
agauaaggcuguauucacag

SEQ ID NO: 17702 - RNA, 20 nt, Artificial Sequence
  SAMD9L targeting guide sequence portion
agaucccaucuccccuggcu

SEQ ID NO: 17703 - RNA, 20 nt, Artificial Sequence
  SAMD9L targeting guide sequence portion
agaugcacaacagccagaac

SEQ ID NO: 17704 - RNA, 20 nt, Artificial Sequence
  SAMD9L targeting guide sequence portion
agauggaaauaaggcaaucu

SEQ ID NO: 17705 - RNA, 20 nt, Artificial Sequence
  SAMD9L targeting guide sequence portion
agaugggaucuaagaaacag

SEQ ID NO: 17706 - RNA, 20 nt, Artificial Sequence
  SAMD9L targeting guide sequence portion
agauuaaauugaauauugaa

SEQ ID NO: 17707 - RNA, 20 nt, Artificial Sequence
  SAMD9L targeting guide sequence portion
agauucaccuguaaauggga

SEQ ID NO: 17708 - RNA, 20 nt, Artificial Sequence
  SAMD9L targeting guide sequence portion
agauugccuuauuuccaucu

SEQ ID NO: 17709 - RNA, 20 nt, Artificial Sequence
  SAMD9L targeting guide sequence portion
agcacagguugagaaguaaa

SEQ ID NO: 17710 - RNA, 20 nt, Artificial Sequence
  SAMD9L targeting guide sequence portion
agcaggagagagaauguuag

SEQ ID NO: 17711 - RNA, 20 nt, Artificial Sequence
  SAMD9L targeting guide sequence portion
agcauguauauagcacaggu

SEQ ID NO: 17712 - RNA, 20 nt, Artificial Sequence
  SAMD9L targeting guide sequence portion
agccagaacagucucaagca

SEQ ID NO: 17713 - RNA, 20 nt, Artificial Sequence
  SAMD9L targeting guide sequence portion
agccaggggagaugggaucu

SEQ ID NO: 17714 - RNA, 20 nt, Artificial Sequence
  SAMD9L targeting guide sequence portion
agccauuuuugucuccugug

SEQ ID NO: 17715 - RNA, 20 nt, Artificial Sequence
  SAMD9L targeting guide sequence portion
agcccucuaaucaggcagga

SEQ ID NO: 17716 - RNA, 20 nt, Artificial Sequence
  SAMD9L targeting guide sequence portion
agccuauguuucacuuuaua

SEQ ID NO: 17717 - RNA, 20 nt, Artificial Sequence
  SAMD9L targeting guide sequence portion
agccuuaucuccaccuguuu

SEQ ID NO: 17718 - RNA, 20 nt, Artificial Sequence
  SAMD9L targeting guide sequence portion
agcucauucucagaugcaca

SEQ ID NO: 17719 - RNA, 20 nt, Artificial Sequence
  SAMD9L targeting guide sequence portion
agcuucugggauggcauucc

SEQ ID NO: 17720 - RNA, 20 nt, Artificial Sequence
  SAMD9L targeting guide sequence portion
aggaagacuuccuggugaag

SEQ ID NO: 17721 - RNA, 20 nt, Artificial Sequence
  SAMD9L targeting guide sequence portion
aggaagagauucaccuguaa

SEQ ID NO: 17722 - RNA, 20 nt, Artificial Sequence
  SAMD9L targeting guide sequence portion
aggaagcccucuaaucaggc

SEQ ID NO: 17723 - RNA, 20 nt, Artificial Sequence
  SAMD9L targeting guide sequence portion
aggaagucuuccuugaccac

SEQ ID NO: 17724 - RNA, 20 nt, Artificial Sequence
  SAMD9L targeting guide sequence portion
aggaaugaugguggucaagg

SEQ ID NO: 17725 - RNA, 20 nt, Artificial Sequence
  SAMD9L targeting guide sequence portion
aggaaugccaucccagaagc

SEQ ID NO: 17726 - RNA, 20 nt, Artificial Sequence
  SAMD9L targeting guide sequence portion
aggagacaaaaauggcuuaa

SEQ ID NO: 17727 - RNA, 20 nt, Artificial Sequence
  SAMD9L targeting guide sequence portion
aggagagagaauguuagaug

SEQ ID NO: 17728 - RNA, 20 nt, Artificial Sequence
  SAMD9L targeting guide sequence portion
aggcaaucucaacagagaga

SEQ ID NO: 17729 - RNA, 20 nt, Artificial Sequence
  SAMD9L targeting guide sequence portion
aggcaaugcguaguucuuaa

SEQ ID NO: 17730 - RNA, 20 nt, Artificial Sequence
  SAMD9L targeting guide sequence portion
aggcaggaaugauggugguc

SEQ ID NO: 17731 - RNA, 20 nt, Artificial Sequence
  SAMD9L targeting guide sequence portion
aggcuaauauagauuaaauu

SEQ ID NO: 17732 - RNA, 20 nt, Artificial Sequence
  SAMD9L targeting guide sequence portion
aggcuguauucacaggagac

SEQ ID NO: 17733 - RNA, 20 nt, Artificial Sequence
  SAMD9L targeting guide sequence portion
agggaacaaagaggguaaug

SEQ ID NO: 17734 - RNA, 20 nt, Artificial Sequence
  SAMD9L targeting guide sequence portion
agggcuuccucaugguaaua

SEQ ID NO: 17735 - RNA, 20 nt, Artificial Sequence
  SAMD9L targeting guide sequence portion
aggggagaugggaucuaaga

SEQ ID NO: 17736 - RNA, 20 nt, Artificial Sequence
  SAMD9L targeting guide sequence portion
aggguaaugaauggaaaaaa

SEQ ID NO: 17737 - RNA, 20 nt, Artificial Sequence
  SAMD9L targeting guide sequence portion
aggugaaucucuuccuuuaa

SEQ ID NO: 17738 - RNA, 20 nt, Artificial Sequence
  SAMD9L targeting guide sequence portion
aggugacucuugaaaucagu

SEQ ID NO: 17739 - RNA, 20 nt, Artificial Sequence
  SAMD9L targeting guide sequence portion
agguggagauaaggcuguau

SEQ ID NO: 17740 - RNA, 20 nt, Artificial Sequence
  SAMD9L targeting guide sequence portion
agguugagaaguaaagggaa

SEQ ID NO: 17741 - RNA, 20 nt, Artificial Sequence
  SAMD9L targeting guide sequence portion
aguaaagggaacaaagaggg

SEQ ID NO: 17742 - RNA, 20 nt, Artificial Sequence
  SAMD9L targeting guide sequence portion
agucaccuucaccaggaagu

SEQ ID NO: 17743 - RNA, 20 nt, Artificial Sequence
  SAMD9L targeting guide sequence portion
agucuuccuugaccaccauc

SEQ ID NO: 17744 - RNA, 20 nt, Artificial Sequence
  SAMD9L targeting guide sequence portion
agugaaacauaggcuaauau

SEQ ID NO: 17745 - RNA, 20 nt, Artificial Sequence
  SAMD9L targeting guide sequence portion
agugucaaggaaugccaucc

SEQ ID NO: 17746 - RNA, 20 nt, Artificial Sequence
  SAMD9L targeting guide sequence portion
aguugugaaugacaaaucag

SEQ ID NO: 17747 - RNA, 20 nt, Artificial Sequence
  SAMD9L targeting guide sequence portion
aguuuucagugucaaggaau

SEQ ID NO: 17748 - RNA, 20 nt, Artificial Sequence
  SAMD9L targeting guide sequence portion
auaaagugaaacauaggcua

SEQ ID NO: 17749 - RNA, 20 nt, Artificial Sequence
  SAMD9L targeting guide sequence portion
auaagccaggggagauggga

SEQ ID NO: 17750 - RNA, 20 nt, Artificial Sequence
  SAMD9L targeting guide sequence portion
auaaggcaaucucaacagag

SEQ ID NO: 17751 - RNA, 20 nt, Artificial Sequence
  SAMD9L targeting guide sequence portion
auaaggcuguauucacagga

SEQ ID NO: 17752 - RNA, 20 nt, Artificial Sequence
  SAMD9L targeting guide sequence portion
auacagccuuaucuccaccu

SEQ ID NO: 17753 - RNA, 20 nt, Artificial Sequence
  SAMD9L targeting guide sequence portion
auacaugcuguucucucugu

SEQ ID NO: 17754 - RNA, 20 nt, Artificial Sequence
  SAMD9L targeting guide sequence portion
auagauuaaauugaauauug

SEQ ID NO: 17755 - RNA, 20 nt, Artificial Sequence
  SAMD9L targeting guide sequence portion
auagcacagguugagaagua

SEQ ID NO: 17756 - RNA, 20 nt, Artificial Sequence
  SAMD9L targeting guide sequence portion
auagcaggagagagaauguu

SEQ ID NO: 17757 - RNA, 20 nt, Artificial Sequence
  SAMD9L targeting guide sequence portion
auaggcaaugcguaguucuu

SEQ ID NO: 17758 - RNA, 20 nt, Artificial Sequence
  SAMD9L targeting guide sequence portion
auaggcuaauauagauuaaa

SEQ ID NO: 17759 - RNA, 20 nt, Artificial Sequence
  SAMD9L targeting guide sequence portion
auauacaugcuguucucucu

SEQ ID NO: 17760 - RNA, 20 nt, Artificial Sequence
  SAMD9L targeting guide sequence portion
auauagauuaaauugaauau

SEQ ID NO: 17761 - RNA, 20 nt, Artificial Sequence
  SAMD9L targeting guide sequence portion
auauagcacagguugagaag

SEQ ID NO: 17762 - RNA, 20 nt, Artificial Sequence
  SAMD9L targeting guide sequence portion
auauguguucucaaguuuuc

SEQ ID NO: 17763 - RNA, 20 nt, Artificial Sequence
  SAMD9L targeting guide sequence portion
auauuaccaugaggaagccc

SEQ ID NO: 17764 - RNA, 20 nt, Artificial Sequence
  SAMD9L targeting guide sequence portion
auauuagccuauguuucacu

SEQ ID NO: 17765 - RNA, 20 nt, Artificial Sequence
  SAMD9L targeting guide sequence portion
auauucaauuuaaucuauau

SEQ ID NO: 17766 - RNA, 20 nt, Artificial Sequence
  SAMD9L targeting guide sequence portion
auauuuuuuauucaauauuc

SEQ ID NO: 17767 - RNA, 20 nt, Artificial Sequence
  SAMD9L targeting guide sequence portion
aucagaauagcaggagagag

SEQ ID NO: 17768 - RNA, 20 nt, Artificial Sequence
  SAMD9L targeting guide sequence portion
aucaggcaggaaugauggug

SEQ ID NO: 17769 - RNA, 20 nt, Artificial Sequence
  SAMD9L targeting guide sequence portion
aucaguugugaaugacaaau

SEQ ID NO: 17770 - RNA, 20 nt, Artificial Sequence
  SAMD9L targeting guide sequence portion
aucauuccugccugauuaga

SEQ ID NO: 17771 - RNA, 20 nt, Artificial Sequence
  SAMD9L targeting guide sequence portion
aucccagaagcucauucuca

SEQ ID NO: 17772 - RNA, 20 nt, Artificial Sequence
  SAMD9L targeting guide sequence portion
aucccaucuccccuggcuua

SEQ ID NO: 17773 - RNA, 20 nt, Artificial Sequence
  SAMD9L targeting guide sequence portion
aucuaacauucucucuccug

SEQ ID NO: 17774 - RNA, 20 nt, Artificial Sequence
  SAMD9L targeting guide sequence portion
aucuaagaaacagguggaga

SEQ ID NO: 17775 - RNA, 20 nt, Artificial Sequence
  SAMD9L targeting guide sequence portion
aucuauauuagccuauguuu

SEQ ID NO: 17776 - RNA, 20 nt, Artificial Sequence
  SAMD9L targeting guide sequence portion
aucucaacagagagaacagc

SEQ ID NO: 17777 - RNA, 20 nt, Artificial Sequence
  SAMD9L targeting guide sequence portion
aucuccaccuguuucuuaga

SEQ ID NO: 17778 - RNA, 20 nt, Artificial Sequence
  SAMD9L targeting guide sequence portion
aucuccccuggcuuauuuuu

SEQ ID NO: 17779 - RNA, 20 nt, Artificial Sequence
  SAMD9L targeting guide sequence portion
aucucuuccuuuaagccauu

SEQ ID NO: 17780 - RNA, 20 nt, Artificial Sequence
  SAMD9L targeting guide sequence portion
aucugagaaugagcuucugg

SEQ ID NO: 17781 - RNA, 20 nt, Artificial Sequence
  SAMD9L targeting guide sequence portion
augaauggaaaaaauaagcc

SEQ ID NO: 17782 - RNA, 20 nt, Artificial Sequence
  SAMD9L targeting guide sequence portion
augacaaaucagaauagcag

SEQ ID NO: 17783 - RNA, 20 nt, Artificial Sequence
  SAMD9L targeting guide sequence portion
augagcuucugggauggcau

SEQ ID NO: 17784 - RNA, 20 nt, Artificial Sequence
  SAMD9L targeting guide sequence portion
augaggaagcccucuaauca

SEQ ID NO: 17785 - RNA, 20 nt, Artificial Sequence
  SAMD9L targeting guide sequence portion
augaugguggucaaggaaga

SEQ ID NO: 17786 - RNA, 20 nt, Artificial Sequence
  SAMD9L targeting guide sequence portion
augcacaacagccagaacag

SEQ ID NO: 17787 - RNA, 20 nt, Artificial Sequence
  SAMD9L targeting guide sequence portion
augccaucccagaagcucau

SEQ ID NO: 17788 - RNA, 20 nt, Artificial Sequence
  SAMD9L targeting guide sequence portion
augcugcuugagacuguucu

SEQ ID NO: 17789 - RNA, 20 nt, Artificial Sequence
  SAMD9L targeting guide sequence portion
augcuguucucucuguugag

SEQ ID NO: 17790 - RNA, 20 nt, Artificial Sequence
  SAMD9L targeting guide sequence portion
auggaaaaaauaagccaggg

SEQ ID NO: 17791 - RNA, 20 nt, Artificial Sequence
  SAMD9L targeting guide sequence portion
auggaaauaaggcaaucuca

SEQ ID NO: 17792 - RNA, 20 nt, Artificial Sequence
  SAMD9L targeting guide sequence portion
auggcauuccuugacacuga

SEQ ID NO: 17793 - RNA, 20 nt, Artificial Sequence
  SAMD9L targeting guide sequence portion
auggcuuaaaggaagagauu

SEQ ID NO: 17794 - RNA, 20 nt, Artificial Sequence
  SAMD9L targeting guide sequence portion
augggaucuaagaaacaggu

SEQ ID NO: 17795 - RNA, 20 nt, Artificial Sequence
  SAMD9L targeting guide sequence portion
augguaauauguguucucaa

SEQ ID NO: 17796 - RNA, 20 nt, Artificial Sequence
  SAMD9L targeting guide sequence portion
augguggucaaggaagacuu

SEQ ID NO: 17797 - RNA, 20 nt, Artificial Sequence
  SAMD9L targeting guide sequence portion
auguauauagcacagguuga

SEQ ID NO: 17798 - RNA, 20 nt, Artificial Sequence
  SAMD9L targeting guide sequence portion
auguguucucaaguuuucag

SEQ ID NO: 17799 - RNA, 20 nt, Artificial Sequence
  SAMD9L targeting guide sequence portion
auguuagauggaaauaaggc

SEQ ID NO: 17800 - RNA, 20 nt, Artificial Sequence
  SAMD9L targeting guide sequence portion
auguuucacuuuauaggcaa

SEQ ID NO: 17801 - RNA, 20 nt, Artificial Sequence
  SAMD9L targeting guide sequence portion
auuaaauugaauauugaaua

SEQ ID NO: 17802 - RNA, 20 nt, Artificial Sequence
  SAMD9L targeting guide sequence portion
auuaccaugaggaagcccuc

SEQ ID NO: 17803 - RNA, 20 nt, Artificial Sequence
  SAMD9L targeting guide sequence portion
auuacccucuuuguucccuu

SEQ ID NO: 17804 - RNA, 20 nt, Artificial Sequence
  SAMD9L targeting guide sequence portion
auuagagggcuuccucaugg

SEQ ID NO: 17805 - RNA, 20 nt, Artificial Sequence
  SAMD9L targeting guide sequence portion
auuagccuauguuucacuuu

SEQ ID NO: 17806 - RNA, 20 nt, Artificial Sequence
  SAMD9L targeting guide sequence portion
auucaauauucaauuuaauc

SEQ ID NO: 17807 - RNA, 20 nt, Artificial Sequence
  SAMD9L targeting guide sequence portion
auucaauuuaaucuauauua

SEQ ID NO: 17808 - RNA, 20 nt, Artificial Sequence
  SAMD9L targeting guide sequence portion
auucacaacugauuucaaga

SEQ ID NO: 17809 - RNA, 20 nt, Artificial Sequence
  SAMD9L targeting guide sequence portion
auucacaggagacaaaaaug

SEQ ID NO: 17810 - RNA, 20 nt, Artificial Sequence
  SAMD9L targeting guide sequence portion
auucauuacccucuuuguuc

SEQ ID NO: 17811 - RNA, 20 nt, Artificial Sequence
  SAMD9L targeting guide sequence portion
auuccugccugauuagaggg

SEQ ID NO: 17812 - RNA, 20 nt, Artificial Sequence
  SAMD9L targeting guide sequence portion
auuccuugacacugaaaacu

SEQ ID NO: 17813 - RNA, 20 nt, Artificial Sequence
  SAMD9L targeting guide sequence portion
auucucagaugcacaacagc

SEQ ID NO: 17814 - RNA, 20 nt, Artificial Sequence
  SAMD9L targeting guide sequence portion
auucucucuccugcuauucu

SEQ ID NO: 17815 - RNA, 20 nt, Artificial Sequence
  SAMD9L targeting guide sequence portion
auucugauuugucauucaca

SEQ ID NO: 17816 - RNA, 20 nt, Artificial Sequence
  SAMD9L targeting guide sequence portion
auugccuauaaagugaaaca

SEQ ID NO: 17817 - RNA, 20 nt, Artificial Sequence
  SAMD9L targeting guide sequence portion
auugccuuauuuccaucuaa

SEQ ID NO: 17818 - RNA, 20 nt, Artificial Sequence
  SAMD9L targeting guide sequence portion
auuuaagaacuacgcauugc

SEQ ID NO: 17819 - RNA, 20 nt, Artificial Sequence
  SAMD9L targeting guide sequence portion
auuuaaucuauauuagccua

SEQ ID NO: 17820 - RNA, 20 nt, Artificial Sequence
  SAMD9L targeting guide sequence portion
auuuacaggugaaucucuuc

SEQ ID NO: 17821 - RNA, 20 nt, Artificial Sequence
  SAMD9L targeting guide sequence portion
auuucaagagucaccuucac

SEQ ID NO: 17822 - RNA, 20 nt, Artificial Sequence
  SAMD9L targeting guide sequence portion
auuuccaucuaacauucucu

SEQ ID NO: 17823 - RNA, 20 nt, Artificial Sequence
  SAMD9L targeting guide sequence portion
auuugucauucacaacugau

SEQ ID NO: 17824 - RNA, 20 nt, Artificial Sequence
  SAMD9L targeting guide sequence portion
auuuuugucuccugugaaua

SEQ ID NO: 17825 - RNA, 20 nt, Artificial Sequence
  SAMD9L targeting guide sequence portion
auuuuuuauucaauauucaa

SEQ ID NO: 17826 - RNA, 20 nt, Artificial Sequence
  SAMD9L targeting guide sequence portion
auuuuuuccauucauuaccc

SEQ ID NO: 17827 - RNA, 20 nt, Artificial Sequence
  SAMD9L targeting guide sequence portion
caaaaauggcuuaaaggaag

SEQ ID NO: 17828 - RNA, 20 nt, Artificial Sequence
  SAMD9L targeting guide sequence portion
caaagaggguaaugaaugga

SEQ ID NO: 17829 - RNA, 20 nt, Artificial Sequence
  SAMD9L targeting guide sequence portion
caaaucagaauagcaggaga

SEQ ID NO: 17830 - RNA, 20 nt, Artificial Sequence
  SAMD9L targeting guide sequence portion
caacagagagaacagcaugu

SEQ ID NO: 17831 - RNA, 20 nt, Artificial Sequence
  SAMD9L targeting guide sequence portion
caacagccagaacagucuca

SEQ ID NO: 17832 - RNA, 20 nt, Artificial Sequence
  SAMD9L targeting guide sequence portion
caaccugugcuauauacaug

SEQ ID NO: 17833 - RNA, 20 nt, Artificial Sequence
  SAMD9L targeting guide sequence portion
caacugauuucaagagucac

SEQ ID NO: 17834 - RNA, 20 nt, Artificial Sequence
  SAMD9L targeting guide sequence portion
caagagucaccuucaccagg

SEQ ID NO: 17835 - RNA, 20 nt, Artificial Sequence
  SAMD9L targeting guide sequence portion
caaggaagacuuccugguga

SEQ ID NO: 17836 - RNA, 20 nt, Artificial Sequence
  SAMD9L targeting guide sequence portion
caaggaaugccaucccagaa

SEQ ID NO: 17837 - RNA, 20 nt, Artificial Sequence
  SAMD9L targeting guide sequence portion
caaguuuucagugucaagga

SEQ ID NO: 17838 - RNA, 20 nt, Artificial Sequence
  SAMD9L targeting guide sequence portion
caauauucaauuuaaucuau

SEQ ID NO: 17839 - RNA, 20 nt, Artificial Sequence
  SAMD9L targeting guide sequence portion
caaucucaacagagagaaca

SEQ ID NO: 17840 - RNA, 20 nt, Artificial Sequence
  SAMD9L targeting guide sequence portion
caauuuaaucuauauuagcc

SEQ ID NO: 17841 - RNA, 20 nt, Artificial Sequence
  SAMD9L targeting guide sequence portion
cacaacagccagaacagucu

SEQ ID NO: 17842 - RNA, 20 nt, Artificial Sequence
  SAMD9L targeting guide sequence portion
cacaacugauuucaagaguc

SEQ ID NO: 17843 - RNA, 20 nt, Artificial Sequence
  SAMD9L targeting guide sequence portion
cacaggagacaaaaauggcu

SEQ ID NO: 17844 - RNA, 20 nt, Artificial Sequence
  SAMD9L targeting guide sequence portion
cacagguugagaaguaaagg

SEQ ID NO: 17845 - RNA, 20 nt, Artificial Sequence
  SAMD9L targeting guide sequence portion
cacauauuaccaugaggaag

SEQ ID NO: 17846 - RNA, 20 nt, Artificial Sequence
  SAMD9L targeting guide sequence portion
caccaggaagucuuccuuga

SEQ ID NO: 17847 - RNA, 20 nt, Artificial Sequence
  SAMD9L targeting guide sequence portion
caccaucauuccugccugau

SEQ ID NO: 17848 - RNA, 20 nt, Artificial Sequence
  SAMD9L targeting guide sequence portion
caccuguuucuuagauccca

SEQ ID NO: 17849 - RNA, 20 nt, Artificial Sequence
  SAMD9L targeting guide sequence portion
caccuucaccaggaagucuu

SEQ ID NO: 17850 - RNA, 20 nt, Artificial Sequence
  SAMD9L targeting guide sequence portion
cacugaaaacuugagaacac

SEQ ID NO: 17851 - RNA, 20 nt, Artificial Sequence
  SAMD9L targeting guide sequence portion
cacuuuauaggcaaugcgua

SEQ ID NO: 17852 - RNA, 20 nt, Artificial Sequence
  SAMD9L targeting guide sequence portion
cagaacagucucaagcagca

SEQ ID NO: 17853 - RNA, 20 nt, Artificial Sequence
  SAMD9L targeting guide sequence portion
cagaagcucauucucagaug

SEQ ID NO: 17854 - RNA, 20 nt, Artificial Sequence
  SAMD9L targeting guide sequence portion
cagaauagcaggagagagaa

SEQ ID NO: 17855 - RNA, 20 nt, Artificial Sequence
  SAMD9L targeting guide sequence portion
cagagagaacagcauguaua

SEQ ID NO: 17856 - RNA, 20 nt, Artificial Sequence
  SAMD9L targeting guide sequence portion
cagaugcacaacagccagaa

SEQ ID NO: 17857 - RNA, 20 nt, Artificial Sequence
  SAMD9L targeting guide sequence portion
cagcauguauauagcacagg

SEQ ID NO: 17858 - RNA, 20 nt, Artificial Sequence
  SAMD9L targeting guide sequence portion
cagccagaacagucucaagc

SEQ ID NO: 17859 - RNA, 20 nt, Artificial Sequence
  SAMD9L targeting guide sequence portion
cagccuuaucuccaccuguu

SEQ ID NO: 17860 - RNA, 20 nt, Artificial Sequence
  SAMD9L targeting guide sequence portion
caggaagucuuccuugacca

SEQ ID NO: 17861 - RNA, 20 nt, Artificial Sequence
  SAMD9L targeting guide sequence portion
caggaaugaugguggucaag

SEQ ID NO: 17862 - RNA, 20 nt, Artificial Sequence
  SAMD9L targeting guide sequence portion
caggagacaaaaauggcuua

SEQ ID NO: 17863 - RNA, 20 nt, Artificial Sequence
  SAMD9L targeting guide sequence portion
caggagagagaauguuagau

SEQ ID NO: 17864 - RNA, 20 nt, Artificial Sequence
  SAMD9L targeting guide sequence portion
caggcaggaaugaugguggu

SEQ ID NO: 17865 - RNA, 20 nt, Artificial Sequence
  SAMD9L targeting guide sequence portion
caggggagaugggaucuaag

SEQ ID NO: 17866 - RNA, 20 nt, Artificial Sequence
  SAMD9L targeting guide sequence portion
caggugaaucucuuccuuua

SEQ ID NO: 17867 - RNA, 20 nt, Artificial Sequence
  SAMD9L targeting guide sequence portion
cagguggagauaaggcugua

SEQ ID NO: 17868 - RNA, 20 nt, Artificial Sequence
  SAMD9L targeting guide sequence portion
cagguugagaaguaaaggga

SEQ ID NO: 17869 - RNA, 20 nt, Artificial Sequence
  SAMD9L targeting guide sequence portion
cagugucaaggaaugccauc

SEQ ID NO: 17870 - RNA, 20 nt, Artificial Sequence
  SAMD9L targeting guide sequence portion
caguugugaaugacaaauca

SEQ ID NO: 17871 - RNA, 20 nt, Artificial Sequence
  SAMD9L targeting guide sequence portion
cauaggcuaauauagauuaa

SEQ ID NO: 17872 - RNA, 20 nt, Artificial Sequence
  SAMD9L targeting guide sequence portion
cauauuaccaugaggaagcc

SEQ ID NO: 17873 - RNA, 20 nt, Artificial Sequence
  SAMD9L targeting guide sequence portion
caucauuccugccugauuag

SEQ ID NO: 17874 - RNA, 20 nt, Artificial Sequence
  SAMD9L targeting guide sequence portion
caucccagaagcucauucuc

SEQ ID NO: 17875 - RNA, 20 nt, Artificial Sequence
  SAMD9L targeting guide sequence portion
caucuaacauucucucuccu

SEQ ID NO: 17876 - RNA, 20 nt, Artificial Sequence
  SAMD9L targeting guide sequence portion
caucuccccuggcuuauuuu

SEQ ID NO: 17877 - RNA, 20 nt, Artificial Sequence
  SAMD9L targeting guide sequence portion
caucugagaaugagcuucug

SEQ ID NO: 17878 - RNA, 20 nt, Artificial Sequence
  SAMD9L targeting guide sequence portion
caugaggaagcccucuaauc

SEQ ID NO: 17879 - RNA, 20 nt, Artificial Sequence
  SAMD9L targeting guide sequence portion
caugcuguucucucuguuga

SEQ ID NO: 17880 - RNA, 20 nt, Artificial Sequence
  SAMD9L targeting guide sequence portion
caugguaauauguguucuca

SEQ ID NO: 17881 - RNA, 20 nt, Artificial Sequence
  SAMD9L targeting guide sequence portion
cauguauauagcacagguug

SEQ ID NO: 17882 - RNA, 20 nt, Artificial Sequence
  SAMD9L targeting guide sequence portion
cauuacccucuuuguucccu

SEQ ID NO: 17883 - RNA, 20 nt, Artificial Sequence
  SAMD9L targeting guide sequence portion
cauucacaacugauuucaag

SEQ ID NO: 17884 - RNA, 20 nt, Artificial Sequence
  SAMD9L targeting guide sequence portion
cauucauuacccucuuuguu

SEQ ID NO: 17885 - RNA, 20 nt, Artificial Sequence
  SAMD9L targeting guide sequence portion
cauuccugccugauuagagg

SEQ ID NO: 17886 - RNA, 20 nt, Artificial Sequence
  SAMD9L targeting guide sequence portion
cauuccuugacacugaaaac

SEQ ID NO: 17887 - RNA, 20 nt, Artificial Sequence
  SAMD9L targeting guide sequence portion
cauucucagaugcacaacag

SEQ ID NO: 17888 - RNA, 20 nt, Artificial Sequence
  SAMD9L targeting guide sequence portion
cauucucucuccugcuauuc

SEQ ID NO: 17889 - RNA, 20 nt, Artificial Sequence
  SAMD9L targeting guide sequence portion
cauugccuauaaagugaaac

SEQ ID NO: 17890 - RNA, 20 nt, Artificial Sequence
  SAMD9L targeting guide sequence portion
cauuuacaggugaaucucuu

SEQ ID NO: 17891 - RNA, 20 nt, Artificial Sequence
  SAMD9L targeting guide sequence portion
cauuuuugucuccugugaau

SEQ ID NO: 17892 - RNA, 20 nt, Artificial Sequence
  SAMD9L targeting guide sequence portion
ccaccaucauuccugccuga

SEQ ID NO: 17893 - RNA, 20 nt, Artificial Sequence
  SAMD9L targeting guide sequence portion
ccaccuguuucuuagauccc

SEQ ID NO: 17894 - RNA, 20 nt, Artificial Sequence
  SAMD9L targeting guide sequence portion
ccagaacagucucaagcagc

SEQ ID NO: 17895 - RNA, 20 nt, Artificial Sequence
  SAMD9L targeting guide sequence portion
ccagaagcucauucucagau

SEQ ID NO: 17896 - RNA, 20 nt, Artificial Sequence
  SAMD9L targeting guide sequence portion
ccaggaagucuuccuugacc

SEQ ID NO: 17897 - RNA, 20 nt, Artificial Sequence
  SAMD9L targeting guide sequence portion
ccaggggagaugggaucuaa

SEQ ID NO: 17898 - RNA, 20 nt, Artificial Sequence
  SAMD9L targeting guide sequence portion
ccaucauuccugccugauua

SEQ ID NO: 17899 - RNA, 20 nt, Artificial Sequence
  SAMD9L targeting guide sequence portion
ccaucccagaagcucauucu

SEQ ID NO: 17900 - RNA, 20 nt, Artificial Sequence
  SAMD9L targeting guide sequence portion
ccaucuaacauucucucucc

SEQ ID NO: 17901 - RNA, 20 nt, Artificial Sequence
  SAMD9L targeting guide sequence portion
ccaucuccccuggcuuauuu

SEQ ID NO: 17902 - RNA, 20 nt, Artificial Sequence
  SAMD9L targeting guide sequence portion
ccaugaggaagcccucuaau

SEQ ID NO: 17903 - RNA, 20 nt, Artificial Sequence
  SAMD9L targeting guide sequence portion
ccauucauuacccucuuugu

SEQ ID NO: 17904 - RNA, 20 nt, Artificial Sequence
  SAMD9L targeting guide sequence portion
ccauuuacaggugaaucucu

SEQ ID NO: 17905 - RNA, 20 nt, Artificial Sequence
  SAMD9L targeting guide sequence portion
ccauuuuugucuccugugaa

SEQ ID NO: 17906 - RNA, 20 nt, Artificial Sequence
  SAMD9L targeting guide sequence portion
cccagaagcucauucucaga

SEQ ID NO: 17907 - RNA, 20 nt, Artificial Sequence
  SAMD9L targeting guide sequence portion
cccaucuccccuggcuuauu

SEQ ID NO: 17908 - RNA, 20 nt, Artificial Sequence
  SAMD9L targeting guide sequence portion
cccauuuacaggugaaucuc

SEQ ID NO: 17909 - RNA, 20 nt, Artificial Sequence
  SAMD9L targeting guide sequence portion
ccccuggcuuauuuuuucca

SEQ ID NO: 17910 - RNA, 20 nt, Artificial Sequence
  SAMD9L targeting guide sequence portion
cccucuaaucaggcaggaau

SEQ ID NO: 17911 - RNA, 20 nt, Artificial Sequence
  SAMD9L targeting guide sequence portion
cccucuuuguucccuuuacu

SEQ ID NO: 17912 - RNA, 20 nt, Artificial Sequence
  SAMD9L targeting guide sequence portion
cccuggcuuauuuuuuccau

SEQ ID NO: 17913 - RNA, 20 nt, Artificial Sequence
  SAMD9L targeting guide sequence portion
cccuuuacuucucaaccugu

SEQ ID NO: 17914 - RNA, 20 nt, Artificial Sequence
  SAMD9L targeting guide sequence portion
ccuauaaagugaaacauagg

SEQ ID NO: 17915 - RNA, 20 nt, Artificial Sequence
  SAMD9L targeting guide sequence portion
ccuauguuucacuuuauagg

SEQ ID NO: 17916 - RNA, 20 nt, Artificial Sequence
  SAMD9L targeting guide sequence portion
ccucaugguaauauguguuc

SEQ ID NO: 17917 - RNA, 20 nt, Artificial Sequence
  SAMD9L targeting guide sequence portion
ccucuaaucaggcaggaaug

SEQ ID NO: 17918 - RNA, 20 nt, Artificial Sequence
  SAMD9L targeting guide sequence portion
ccucuuuguucccuuuacuu

SEQ ID NO: 17919 - RNA, 20 nt, Artificial Sequence
  SAMD9L targeting guide sequence portion
ccugauuagagggcuuccuc

SEQ ID NO: 17920 - RNA, 20 nt, Artificial Sequence
  SAMD9L targeting guide sequence portion
ccugccugauuagagggcuu

SEQ ID NO: 17921 - RNA, 20 nt, Artificial Sequence
  SAMD9L targeting guide sequence portion
ccugcuauucugauuuguca

SEQ ID NO: 17922 - RNA, 20 nt, Artificial Sequence
  SAMD9L targeting guide sequence portion
ccuggcuuauuuuuuccauu

SEQ ID NO: 17923 - RNA, 20 nt, Artificial Sequence
  SAMD9L targeting guide sequence portion
ccuggugaaggugacucuug

SEQ ID NO: 17924 - RNA, 20 nt, Artificial Sequence
  SAMD9L targeting guide sequence portion
ccugugaauacagccuuauc

SEQ ID NO: 17925 - RNA, 20 nt, Artificial Sequence
  SAMD9L targeting guide sequence portion
ccugugcuauauacaugcug

SEQ ID NO: 17926 - RNA, 20 nt, Artificial Sequence
  SAMD9L targeting guide sequence portion
ccuguuucuuagaucccauc

SEQ ID NO: 17927 - RNA, 20 nt, Artificial Sequence
  SAMD9L targeting guide sequence portion
ccuuaucuccaccuguuucu

SEQ ID NO: 17928 - RNA, 20 nt, Artificial Sequence
  SAMD9L targeting guide sequence portion
ccuuauuuccaucuaacauu

SEQ ID NO: 17929 - RNA, 20 nt, Artificial Sequence
  SAMD9L targeting guide sequence portion
ccuucaccaggaagucuucc

SEQ ID NO: 17930 - RNA, 20 nt, Artificial Sequence
  SAMD9L targeting guide sequence portion
ccuugacacugaaaacuuga

SEQ ID NO: 17931 - RNA, 20 nt, Artificial Sequence
  SAMD9L targeting guide sequence portion
ccuugaccaccaucauuccu

SEQ ID NO: 17932 - RNA, 20 nt, Artificial Sequence
  SAMD9L targeting guide sequence portion
ccuuuaagccauuuuugucu

SEQ ID NO: 17933 - RNA, 20 nt, Artificial Sequence
  SAMD9L targeting guide sequence portion
ccuuuacuucucaaccugug

SEQ ID NO: 17934 - RNA, 20 nt, Artificial Sequence
  SAMD9L targeting guide sequence portion
cgcauugccuauaaagugaa

SEQ ID NO: 17935 - RNA, 20 nt, Artificial Sequence
  SAMD9L targeting guide sequence portion
cuaacauucucucuccugcu

SEQ ID NO: 17936 - RNA, 20 nt, Artificial Sequence
  SAMD9L targeting guide sequence portion
cuaagaaacagguggagaua

SEQ ID NO: 17937 - RNA, 20 nt, Artificial Sequence
  SAMD9L targeting guide sequence portion
cuaauauagauuaaauugaa

SEQ ID NO: 17938 - RNA, 20 nt, Artificial Sequence
  SAMD9L targeting guide sequence portion
cuaaucaggcaggaaugaug

SEQ ID NO: 17939 - RNA, 20 nt, Artificial Sequence
  SAMD9L targeting guide sequence portion
cuacgcauugccuauaaagu

SEQ ID NO: 17940 - RNA, 20 nt, Artificial Sequence
  SAMD9L targeting guide sequence portion
cuagaaugcugcuugagacu

SEQ ID NO: 17941 - RNA, 20 nt, Artificial Sequence
  SAMD9L targeting guide sequence portion
cuauaaagugaaacauaggc

SEQ ID NO: 17942 - RNA, 20 nt, Artificial Sequence
  SAMD9L targeting guide sequence portion
cuauauacaugcuguucucu

SEQ ID NO: 17943 - RNA, 20 nt, Artificial Sequence
  SAMD9L targeting guide sequence portion
cuauauuagccuauguuuca

SEQ ID NO: 17944 - RNA, 20 nt, Artificial Sequence
  SAMD9L targeting guide sequence portion
cuauguuucacuuuauaggc

SEQ ID NO: 17945 - RNA, 20 nt, Artificial Sequence
  SAMD9L targeting guide sequence portion
cuauucugauuugucauuca

SEQ ID NO: 17946 - RNA, 20 nt, Artificial Sequence
  SAMD9L targeting guide sequence portion
cucaacagagagaacagcau

SEQ ID NO: 17947 - RNA, 20 nt, Artificial Sequence
  SAMD9L targeting guide sequence portion
cucaaccugugcuauauaca

SEQ ID NO: 17948 - RNA, 20 nt, Artificial Sequence
  SAMD9L targeting guide sequence portion
cucaaguuuucagugucaag

SEQ ID NO: 17949 - RNA, 20 nt, Artificial Sequence
  SAMD9L targeting guide sequence portion
cucagaugcacaacagccag

SEQ ID NO: 17950 - RNA, 20 nt, Artificial Sequence
  SAMD9L targeting guide sequence portion
cucaugguaauauguguucu

SEQ ID NO: 17951 - RNA, 20 nt, Artificial Sequence
  SAMD9L targeting guide sequence portion
cucauucucagaugcacaac

SEQ ID NO: 17952 - RNA, 20 nt, Artificial Sequence
  SAMD9L targeting guide sequence portion
cuccaccuguuucuuagauc

SEQ ID NO: 17953 - RNA, 20 nt, Artificial Sequence
  SAMD9L targeting guide sequence portion
cuccccuggcuuauuuuuuc

SEQ ID NO: 17954 - RNA, 20 nt, Artificial Sequence
  SAMD9L targeting guide sequence portion
cuccugcuauucugauuugu

SEQ ID NO: 17955 - RNA, 20 nt, Artificial Sequence
  SAMD9L targeting guide sequence portion
cuccugugaauacagccuua

SEQ ID NO: 17956 - RNA, 20 nt, Artificial Sequence
  SAMD9L targeting guide sequence portion
cucuaaucaggcaggaauga

SEQ ID NO: 17957 - RNA, 20 nt, Artificial Sequence
  SAMD9L targeting guide sequence portion
cucuagaaugcugcuugaga

SEQ ID NO: 17958 - RNA, 20 nt, Artificial Sequence
  SAMD9L targeting guide sequence portion
cucuccugcuauucugauuu

SEQ ID NO: 17959 - RNA, 20 nt, Artificial Sequence
  SAMD9L targeting guide sequence portion
cucucuccugcuauucugau

SEQ ID NO: 17960 - RNA, 20 nt, Artificial Sequence
  SAMD9L targeting guide sequence portion
cucucuguugagauugccuu

SEQ ID NO: 17961 - RNA, 20 nt, Artificial Sequence
  SAMD9L targeting guide sequence portion
cucuguugagauugccuuau

SEQ ID NO: 17962 - RNA, 20 nt, Artificial Sequence
  SAMD9L targeting guide sequence portion
cucuuccuuuaagccauuuu

SEQ ID NO: 17963 - RNA, 20 nt, Artificial Sequence
  SAMD9L targeting guide sequence portion
cucuugaaaucaguugugaa

SEQ ID NO: 17964 - RNA, 20 nt, Artificial Sequence
  SAMD9L targeting guide sequence portion
cucuuguucccauuuacagg

SEQ ID NO: 17965 - RNA, 20 nt, Artificial Sequence
  SAMD9L targeting guide sequence portion
cucuuuguucccuuuacuuc

SEQ ID NO: 17966 - RNA, 20 nt, Artificial Sequence
  SAMD9L targeting guide sequence portion
cugaaaacuugagaacacau

SEQ ID NO: 17967 - RNA, 20 nt, Artificial Sequence
  SAMD9L targeting guide sequence portion
cugagaaugagcuucuggga

SEQ ID NO: 17968 - RNA, 20 nt, Artificial Sequence
  SAMD9L targeting guide sequence portion
cugauuagagggcuuccuca

SEQ ID NO: 17969 - RNA, 20 nt, Artificial Sequence
  SAMD9L targeting guide sequence portion
cugauuucaagagucaccuu

SEQ ID NO: 17970 - RNA, 20 nt, Artificial Sequence
  SAMD9L targeting guide sequence portion
cugauuugucauucacaacu

SEQ ID NO: 17971 - RNA, 20 nt, Artificial Sequence
  SAMD9L targeting guide sequence portion
cugccugauuagagggcuuc

SEQ ID NO: 17972 - RNA, 20 nt, Artificial Sequence
  SAMD9L targeting guide sequence portion
cugcuauucugauuugucau

SEQ ID NO: 17973 - RNA, 20 nt, Artificial Sequence
  SAMD9L targeting guide sequence portion
cugcuugagacuguucuggc

SEQ ID NO: 17974 - RNA, 20 nt, Artificial Sequence
  SAMD9L targeting guide sequence portion
cuggcuguugugcaucugag

SEQ ID NO: 17975 - RNA, 20 nt, Artificial Sequence
  SAMD9L targeting guide sequence portion
cuggcuuauuuuuuccauuc

SEQ ID NO: 17976 - RNA, 20 nt, Artificial Sequence
  SAMD9L targeting guide sequence portion
cugggauggcauuccuugac

SEQ ID NO: 17977 - RNA, 20 nt, Artificial Sequence
  SAMD9L targeting guide sequence portion
cuggugaaggugacucuuga

SEQ ID NO: 17978 - RNA, 20 nt, Artificial Sequence
  SAMD9L targeting guide sequence portion
cuguauucacaggagacaaa

SEQ ID NO: 17979 - RNA, 20 nt, Artificial Sequence
  SAMD9L targeting guide sequence portion
cugugaauacagccuuaucu

SEQ ID NO: 17980 - RNA, 20 nt, Artificial Sequence
  SAMD9L targeting guide sequence portion
cugugcuauauacaugcugu

SEQ ID NO: 17981 - RNA, 20 nt, Artificial Sequence
  SAMD9L targeting guide sequence portion
cuguucucucuguugagauu

SEQ ID NO: 17982 - RNA, 20 nt, Artificial Sequence
  SAMD9L targeting guide sequence portion
cuguucuggcuguugugcau

SEQ ID NO: 17983 - RNA, 20 nt, Artificial Sequence
  SAMD9L targeting guide sequence portion
cuguugagauugccuuauuu

SEQ ID NO: 17984 - RNA, 20 nt, Artificial Sequence
  SAMD9L targeting guide sequence portion
cuguugugcaucugagaaug

SEQ ID NO: 17985 - RNA, 20 nt, Artificial Sequence
  SAMD9L targeting guide sequence portion
cuguuucuuagaucccaucu

SEQ ID NO: 17986 - RNA, 20 nt, Artificial Sequence
  SAMD9L targeting guide sequence portion
cuuaaaggaagagauucacc

SEQ ID NO: 17987 - RNA, 20 nt, Artificial Sequence
  SAMD9L targeting guide sequence portion
cuuagaucccaucuccccug

SEQ ID NO: 17988 - RNA, 20 nt, Artificial Sequence
  SAMD9L targeting guide sequence portion
cuuaucuccaccuguuucuu

SEQ ID NO: 17989 - RNA, 20 nt, Artificial Sequence
  SAMD9L targeting guide sequence portion
cuuauuuccaucuaacauuc

SEQ ID NO: 17990 - RNA, 20 nt, Artificial Sequence
  SAMD9L targeting guide sequence portion
cuuauuuuuuccauucauua

SEQ ID NO: 17991 - RNA, 20 nt, Artificial Sequence
  SAMD9L targeting guide sequence portion
cuucaccaggaagucuuccu

SEQ ID NO: 17992 - RNA, 20 nt, Artificial Sequence
  SAMD9L targeting guide sequence portion
cuuccucaugguaauaugug

SEQ ID NO: 17993 - RNA, 20 nt, Artificial Sequence
  SAMD9L targeting guide sequence portion
cuuccuggugaaggugacuc

SEQ ID NO: 17994 - RNA, 20 nt, Artificial Sequence
  SAMD9L targeting guide sequence portion
cuuccuugaccaccaucauu

SEQ ID NO: 17995 - RNA, 20 nt, Artificial Sequence
  SAMD9L targeting guide sequence portion
cuuccuuuaagccauuuuug

SEQ ID NO: 17996 - RNA, 20 nt, Artificial Sequence
  SAMD9L targeting guide sequence portion
cuucucaaccugugcuauau

SEQ ID NO: 17997 - RNA, 20 nt, Artificial Sequence
  SAMD9L targeting guide sequence portion
cuucugggauggcauuccuu

SEQ ID NO: 17998 - RNA, 20 nt, Artificial Sequence
  SAMD9L targeting guide sequence portion
cuugaaaucaguugugaaug

SEQ ID NO: 17999 - RNA, 20 nt, Artificial Sequence
  SAMD9L targeting guide sequence portion
cuugacacugaaaacuugag

SEQ ID NO: 18000 - RNA, 20 nt, Artificial Sequence
  SAMD9L targeting guide sequence portion
cuugaccaccaucauuccug

SEQ ID NO: 18001 - RNA, 20 nt, Artificial Sequence
  SAMD9L targeting guide sequence portion
cuugagaacacauauuacca

SEQ ID NO: 18002 - RNA, 20 nt, Artificial Sequence
  SAMD9L targeting guide sequence portion
cuugagacuguucuggcugu

SEQ ID NO: 18003 - RNA, 20 nt, Artificial Sequence
  SAMD9L targeting guide sequence portion
cuuguucccauuuacaggug

SEQ ID NO: 18004 - RNA, 20 nt, Artificial Sequence
  SAMD9L targeting guide sequence portion
cuuuaagccauuuuugucuc

SEQ ID NO: 18005 - RNA, 20 nt, Artificial Sequence
  SAMD9L targeting guide sequence portion
cuuuacuucucaaccugugc

SEQ ID NO: 18006 - RNA, 20 nt, Artificial Sequence
  SAMD9L targeting guide sequence portion
cuuuauaggcaaugcguagu

SEQ ID NO: 18007 - RNA, 20 nt, Artificial Sequence
  SAMD9L targeting guide sequence portion
cuuuguucccuuuacuucuc

SEQ ID NO: 18008 - RNA, 20 nt, Artificial Sequence
  SAMD9L targeting guide sequence portion
gaaaaaauaagccaggggag

SEQ ID NO: 18009 - RNA, 20 nt, Artificial Sequence
  SAMD9L targeting guide sequence portion
gaaaacuugagaacacauau

SEQ ID NO: 18010 - RNA, 20 nt, Artificial Sequence
  SAMD9L targeting guide sequence portion
gaaacagguggagauaaggc

SEQ ID NO: 18011 - RNA, 20 nt, Artificial Sequence
  SAMD9L targeting guide sequence portion
gaaacauaggcuaauauaga

SEQ ID NO: 18012 - RNA, 20 nt, Artificial Sequence
  SAMD9L targeting guide sequence portion
gaaauaaggcaaucucaaca

SEQ ID NO: 18013 - RNA, 20 nt, Artificial Sequence
  SAMD9L targeting guide sequence portion
gaaaucaguugugaaugaca

SEQ ID NO: 18014 - RNA, 20 nt, Artificial Sequence
  SAMD9L targeting guide sequence portion
gaacaaagaggguaaugaau

SEQ ID NO: 18015 - RNA, 20 nt, Artificial Sequence
  SAMD9L targeting guide sequence portion
gaacacauauuaccaugagg

SEQ ID NO: 18016 - RNA, 20 nt, Artificial Sequence
  SAMD9L targeting guide sequence portion
gaacagcauguauauagcac

SEQ ID NO: 18017 - RNA, 20 nt, Artificial Sequence
  SAMD9L targeting guide sequence portion
gaacagucucaagcagcauu

SEQ ID NO: 18018 - RNA, 20 nt, Artificial Sequence
  SAMD9L targeting guide sequence portion
gaacuacgcauugccuauaa

SEQ ID NO: 18019 - RNA, 20 nt, Artificial Sequence
  SAMD9L targeting guide sequence portion
gaagacuuccuggugaaggu

SEQ ID NO: 18020 - RNA, 20 nt, Artificial Sequence
  SAMD9L targeting guide sequence portion
gaagagauucaccuguaaau

SEQ ID NO: 18021 - RNA, 20 nt, Artificial Sequence
  SAMD9L targeting guide sequence portion
gaagcccucuaaucaggcag

SEQ ID NO: 18022 - RNA, 20 nt, Artificial Sequence
  SAMD9L targeting guide sequence portion
gaagcucauucucagaugca

SEQ ID NO: 18023 - RNA, 20 nt, Artificial Sequence
  SAMD9L targeting guide sequence portion
gaaggugacucuugaaauca

SEQ ID NO: 18024 - RNA, 20 nt, Artificial Sequence
  SAMD9L targeting guide sequence portion
gaaguaaagggaacaaagag

SEQ ID NO: 18025 - RNA, 20 nt, Artificial Sequence
  SAMD9L targeting guide sequence portion
gaagucuuccuugaccacca

SEQ ID NO: 18026 - RNA, 20 nt, Artificial Sequence
  SAMD9L targeting guide sequence portion
gaauacagccuuaucuccac

SEQ ID NO: 18027 - RNA, 20 nt, Artificial Sequence
  SAMD9L targeting guide sequence portion
gaauagcaggagagagaaug

SEQ ID NO: 18028 - RNA, 20 nt, Artificial Sequence
  SAMD9L targeting guide sequence portion
gaaucucuuccuuuaagcca

SEQ ID NO: 18029 - RNA, 20 nt, Artificial Sequence
  SAMD9L targeting guide sequence portion
gaaugacaaaucagaauagc

SEQ ID NO: 18030 - RNA, 20 nt, Artificial Sequence
  SAMD9L targeting guide sequence portion
gaaugagcuucugggauggc

SEQ ID NO: 18031 - RNA, 20 nt, Artificial Sequence
  SAMD9L targeting guide sequence portion
gaaugaugguggucaaggaa

SEQ ID NO: 18032 - RNA, 20 nt, Artificial Sequence
  SAMD9L targeting guide sequence portion
gaaugccaucccagaagcuc

SEQ ID NO: 18033 - RNA, 20 nt, Artificial Sequence
  SAMD9L targeting guide sequence portion
gaaugcugcuugagacuguu

SEQ ID NO: 18034 - RNA, 20 nt, Artificial Sequence
  SAMD9L targeting guide sequence portion
gaauggaaaaaauaagccag

SEQ ID NO: 18035 - RNA, 20 nt, Artificial Sequence
  SAMD9L targeting guide sequence portion
gaauguuagauggaaauaag

SEQ ID NO: 18036 - RNA, 20 nt, Artificial Sequence
  SAMD9L targeting guide sequence portion
gaauuuaagaacuacgcauu

SEQ ID NO: 18037 - RNA, 20 nt, Artificial Sequence
  SAMD9L targeting guide sequence portion
gacaaaaauggcuuaaagga

SEQ ID NO: 18038 - RNA, 20 nt, Artificial Sequence
  SAMD9L targeting guide sequence portion
gacaaaucagaauagcagga

SEQ ID NO: 18039 - RNA, 20 nt, Artificial Sequence
  SAMD9L targeting guide sequence portion
gacacugaaaacuugagaac

SEQ ID NO: 18040 - RNA, 20 nt, Artificial Sequence
  SAMD9L targeting guide sequence portion
gaccaccaucauuccugccu

SEQ ID NO: 18041 - RNA, 20 nt, Artificial Sequence
  SAMD9L targeting guide sequence portion
gacucuugaaaucaguugug

SEQ ID NO: 18042 - RNA, 20 nt, Artificial Sequence
  SAMD9L targeting guide sequence portion
gacuguucuggcuguugugc

SEQ ID NO: 18043 - RNA, 20 nt, Artificial Sequence
  SAMD9L targeting guide sequence portion
gacuuccuggugaaggugac

SEQ ID NO: 18044 - RNA, 20 nt, Artificial Sequence
  SAMD9L targeting guide sequence portion
gagaacacauauuaccauga

SEQ ID NO: 18045 - RNA, 20 nt, Artificial Sequence
  SAMD9L targeting guide sequence portion
gagaacagcauguauauagc

SEQ ID NO: 18046 - RNA, 20 nt, Artificial Sequence
  SAMD9L targeting guide sequence portion
gagaaguaaagggaacaaag

SEQ ID NO: 18047 - RNA, 20 nt, Artificial Sequence
  SAMD9L targeting guide sequence portion
gagaaugagcuucugggaug

SEQ ID NO: 18048 - RNA, 20 nt, Artificial Sequence
  SAMD9L targeting guide sequence portion
gagaauguuagauggaaaua

SEQ ID NO: 18049 - RNA, 20 nt, Artificial Sequence
  SAMD9L targeting guide sequence portion
gagacaaaaauggcuuaaag

SEQ ID NO: 18050 - RNA, 20 nt, Artificial Sequence
  SAMD9L targeting guide sequence portion
gagacuguucuggcuguugu

SEQ ID NO: 18051 - RNA, 20 nt, Artificial Sequence
  SAMD9L targeting guide sequence portion
gagagaacagcauguauaua

SEQ ID NO: 18052 - RNA, 20 nt, Artificial Sequence
  SAMD9L targeting guide sequence portion
gagagaauguuagauggaaa

SEQ ID NO: 18053 - RNA, 20 nt, Artificial Sequence
  SAMD9L targeting guide sequence portion
gagagagaauguuagaugga

SEQ ID NO: 18054 - RNA, 20 nt, Artificial Sequence
  SAMD9L targeting guide sequence portion
gagauaaggcuguauucaca

SEQ ID NO: 18055 - RNA, 20 nt, Artificial Sequence
  SAMD9L targeting guide sequence portion
gagaugggaucuaagaaaca

SEQ ID NO: 18056 - RNA, 20 nt, Artificial Sequence
  SAMD9L targeting guide sequence portion
gagauucaccuguaaauggg

SEQ ID NO: 18057 - RNA, 20 nt, Artificial Sequence
  SAMD9L targeting guide sequence portion
gagauugccuuauuuccauc

SEQ ID NO: 18058 - RNA, 20 nt, Artificial Sequence
  SAMD9L targeting guide sequence portion
gagcuucugggauggcauuc

SEQ ID NO: 18059 - RNA, 20 nt, Artificial Sequence
  SAMD9L targeting guide sequence portion
gaggaagcccucuaaucagg

SEQ ID NO: 18060 - RNA, 20 nt, Artificial Sequence
  SAMD9L targeting guide sequence portion
gagggcuuccucaugguaau

SEQ ID NO: 18061 - RNA, 20 nt, Artificial Sequence
  SAMD9L targeting guide sequence portion
gaggguaaugaauggaaaaa

SEQ ID NO: 18062 - RNA, 20 nt, Artificial Sequence
  SAMD9L targeting guide sequence portion
gagucaccuucaccaggaag

SEQ ID NO: 18063 - RNA, 20 nt, Artificial Sequence
  SAMD9L targeting guide sequence portion
gauaaggcuguauucacagg

SEQ ID NO: 18064 - RNA, 20 nt, Artificial Sequence
  SAMD9L targeting guide sequence portion
gaucccaucuccccuggcuu

SEQ ID NO: 18065 - RNA, 20 nt, Artificial Sequence
  SAMD9L targeting guide sequence portion
gaucuaagaaacagguggag

SEQ ID NO: 18066 - RNA, 20 nt, Artificial Sequence
  SAMD9L targeting guide sequence portion
gaugcacaacagccagaaca

SEQ ID NO: 18067 - RNA, 20 nt, Artificial Sequence
  SAMD9L targeting guide sequence portion
gauggaaauaaggcaaucuc

SEQ ID NO: 18068 - RNA, 20 nt, Artificial Sequence
  SAMD9L targeting guide sequence portion
gauggcauuccuugacacug

SEQ ID NO: 18069 - RNA, 20 nt, Artificial Sequence
  SAMD9L targeting guide sequence portion
gaugggaucuaagaaacagg

SEQ ID NO: 18070 - RNA, 20 nt, Artificial Sequence
  SAMD9L targeting guide sequence portion
gaugguggucaaggaagacu

SEQ ID NO: 18071 - RNA, 20 nt, Artificial Sequence
  SAMD9L targeting guide sequence portion
gauuaaauugaauauugaau

SEQ ID NO: 18072 - RNA, 20 nt, Artificial Sequence
  SAMD9L targeting guide sequence portion
gauuagagggcuuccucaug

SEQ ID NO: 18073 - RNA, 20 nt, Artificial Sequence
  SAMD9L targeting guide sequence portion
gauucaccuguaaaugggaa

SEQ ID NO: 18074 - RNA, 20 nt, Artificial Sequence
  SAMD9L targeting guide sequence portion
gauugccuuauuuccaucua

SEQ ID NO: 18075 - RNA, 20 nt, Artificial Sequence
  SAMD9L targeting guide sequence portion
gauuucaagagucaccuuca

SEQ ID NO: 18076 - RNA, 20 nt, Artificial Sequence
  SAMD9L targeting guide sequence portion
gauuugucauucacaacuga

SEQ ID NO: 18077 - RNA, 20 nt, Artificial Sequence
  SAMD9L targeting guide sequence portion
gcaaucucaacagagagaac

SEQ ID NO: 18078 - RNA, 20 nt, Artificial Sequence
  SAMD9L targeting guide sequence portion
gcacaacagccagaacaguc

SEQ ID NO: 18079 - RNA, 20 nt, Artificial Sequence
  SAMD9L targeting guide sequence portion
gcacagguugagaaguaaag

SEQ ID NO: 18080 - RNA, 20 nt, Artificial Sequence
  SAMD9L targeting guide sequence portion
gcaggaaugaugguggucaa

SEQ ID NO: 18081 - RNA, 20 nt, Artificial Sequence
  SAMD9L targeting guide sequence portion
gcaggagagagaauguuaga

SEQ ID NO: 18082 - RNA, 20 nt, Artificial Sequence
  SAMD9L targeting guide sequence portion
gcaucugagaaugagcuucu

SEQ ID NO: 18083 - RNA, 20 nt, Artificial Sequence
  SAMD9L targeting guide sequence portion
gcauguauauagcacagguu

SEQ ID NO: 18084 - RNA, 20 nt, Artificial Sequence
  SAMD9L targeting guide sequence portion
gcauuccuugacacugaaaa

SEQ ID NO: 18085 - RNA, 20 nt, Artificial Sequence
  SAMD9L targeting guide sequence portion
gcauugccuauaaagugaaa

SEQ ID NO: 18086 - RNA, 20 nt, Artificial Sequence
  SAMD9L targeting guide sequence portion
gccagaacagucucaagcag

SEQ ID NO: 18087 - RNA, 20 nt, Artificial Sequence
  SAMD9L targeting guide sequence portion
gccaggggagaugggaucua

SEQ ID NO: 18088 - RNA, 20 nt, Artificial Sequence
  SAMD9L targeting guide sequence portion
gccaucccagaagcucauuc

SEQ ID NO: 18089 - RNA, 20 nt, Artificial Sequence
  SAMD9L targeting guide sequence portion
gccauuuuugucuccuguga

SEQ ID NO: 18090 - RNA, 20 nt, Artificial Sequence
  SAMD9L targeting guide sequence portion
gcccucuaaucaggcaggaa

SEQ ID NO: 18091 - RNA, 20 nt, Artificial Sequence
  SAMD9L targeting guide sequence portion
gccuauaaagugaaacauag

SEQ ID NO: 18092 - RNA, 20 nt, Artificial Sequence
  SAMD9L targeting guide sequence portion
gccuauguuucacuuuauag

SEQ ID NO: 18093 - RNA, 20 nt, Artificial Sequence
  SAMD9L targeting guide sequence portion
gccugauuagagggcuuccu

SEQ ID NO: 18094 - RNA, 20 nt, Artificial Sequence
  SAMD9L targeting guide sequence portion
gccuuaucuccaccuguuuc

SEQ ID NO: 18095 - RNA, 20 nt, Artificial Sequence
  SAMD9L targeting guide sequence portion
gccuuauuuccaucuaacau

SEQ ID NO: 18096 - RNA, 20 nt, Artificial Sequence
  SAMD9L targeting guide sequence portion
gcuaauauagauuaaauuga

SEQ ID NO: 18097 - RNA, 20 nt, Artificial Sequence
  SAMD9L targeting guide sequence portion
gcuauauacaugcuguucuc

SEQ ID NO: 18098 - RNA, 20 nt, Artificial Sequence
  SAMD9L targeting guide sequence portion
gcuauucugauuugucauuc

SEQ ID NO: 18099 - RNA, 20 nt, Artificial Sequence
  SAMD9L targeting guide sequence portion
gcucauucucagaugcacaa

SEQ ID NO: 18100 - RNA, 20 nt, Artificial Sequence
  SAMD9L targeting guide sequence portion
gcucuagaaugcugcuugag

SEQ ID NO: 18101 - RNA, 20 nt, Artificial Sequence
  SAMD9L targeting guide sequence portion
gcugcuugagacuguucugg

SEQ ID NO: 18102 - RNA, 20 nt, Artificial Sequence
  SAMD9L targeting guide sequence portion
gcuguauucacaggagacaa

SEQ ID NO: 18103 - RNA, 20 nt, Artificial Sequence
  SAMD9L targeting guide sequence portion
gcuguucucucuguugagau

SEQ ID NO: 18104 - RNA, 20 nt, Artificial Sequence
  SAMD9L targeting guide sequence portion
gcuguugugcaucugagaau

SEQ ID NO: 18105 - RNA, 20 nt, Artificial Sequence
  SAMD9L targeting guide sequence portion
gcuuaaaggaagagauucac

SEQ ID NO: 18106 - RNA, 20 nt, Artificial Sequence
  SAMD9L targeting guide sequence portion
gcuuauuuuuuccauucauu

SEQ ID NO: 18107 - RNA, 20 nt, Artificial Sequence
  SAMD9L targeting guide sequence portion
gcuuccucaugguaauaugu

SEQ ID NO: 18108 - RNA, 20 nt, Artificial Sequence
  SAMD9L targeting guide sequence portion
gcuucugggauggcauuccu

SEQ ID NO: 18109 - RNA, 20 nt, Artificial Sequence
  SAMD9L targeting guide sequence portion
gcuugagacuguucuggcug

SEQ ID NO: 18110 - RNA, 20 nt, Artificial Sequence
  SAMD9L targeting guide sequence portion
ggaaaaaauaagccagggga

SEQ ID NO: 18111 - RNA, 20 nt, Artificial Sequence
  SAMD9L targeting guide sequence portion
ggaaauaaggcaaucucaac

SEQ ID NO: 18112 - RNA, 20 nt, Artificial Sequence
  SAMD9L targeting guide sequence portion
ggaacaaagaggguaaugaa

SEQ ID NO: 18113 - RNA, 20 nt, Artificial Sequence
  SAMD9L targeting guide sequence portion
ggaagacuuccuggugaagg

SEQ ID NO: 18114 - RNA, 20 nt, Artificial Sequence
  SAMD9L targeting guide sequence portion
ggaagagauucaccuguaaa

SEQ ID NO: 18115 - RNA, 20 nt, Artificial Sequence
  SAMD9L targeting guide sequence portion
ggaagcccucuaaucaggca

SEQ ID NO: 18116 - RNA, 20 nt, Artificial Sequence
  SAMD9L targeting guide sequence portion
ggaagucuuccuugaccacc

SEQ ID NO: 18117 - RNA, 20 nt, Artificial Sequence
  SAMD9L targeting guide sequence portion
ggaaugaugguggucaagga

SEQ ID NO: 18118 - RNA, 20 nt, Artificial Sequence
  SAMD9L targeting guide sequence portion
ggaaugccaucccagaagcu

SEQ ID NO: 18119 - RNA, 20 nt, Artificial Sequence
  SAMD9L targeting guide sequence portion
ggaauuuaagaacuacgcau

SEQ ID NO: 18120 - RNA, 20 nt, Artificial Sequence
  SAMD9L targeting guide sequence portion
ggagacaaaaauggcuuaaa

SEQ ID NO: 18121 - RNA, 20 nt, Artificial Sequence
  SAMD9L targeting guide sequence portion
ggagagagaauguuagaugg

SEQ ID NO: 18122 - RNA, 20 nt, Artificial Sequence
  SAMD9L targeting guide sequence portion
ggagauaaggcuguauucac

SEQ ID NO: 18123 - RNA, 20 nt, Artificial Sequence
  SAMD9L targeting guide sequence portion
ggagaugggaucuaagaaac

SEQ ID NO: 18124 - RNA, 20 nt, Artificial Sequence
  SAMD9L targeting guide sequence portion
ggaucuaagaaacaggugga

SEQ ID NO: 18125 - RNA, 20 nt, Artificial Sequence
  SAMD9L targeting guide sequence portion
ggauggcauuccuugacacu

SEQ ID NO: 18126 - RNA, 20 nt, Artificial Sequence
  SAMD9L targeting guide sequence portion
ggcaaucucaacagagagaa

SEQ ID NO: 18127 - RNA, 20 nt, Artificial Sequence
  SAMD9L targeting guide sequence portion
ggcaggaaugauggugguca

SEQ ID NO: 18128 - RNA, 20 nt, Artificial Sequence
  SAMD9L targeting guide sequence portion
ggcauuccuugacacugaaa

SEQ ID NO: 18129 - RNA, 20 nt, Artificial Sequence
  SAMD9L targeting guide sequence portion
ggcuaauauagauuaaauug

SEQ ID NO: 18130 - RNA, 20 nt, Artificial Sequence
  SAMD9L targeting guide sequence portion
ggcuguauucacaggagaca

SEQ ID NO: 18131 - RNA, 20 nt, Artificial Sequence
  SAMD9L targeting guide sequence portion
ggcuguugugcaucugagaa

SEQ ID NO: 18132 - RNA, 20 nt, Artificial Sequence
  SAMD9L targeting guide sequence portion
ggcuuaaaggaagagauuca

SEQ ID NO: 18133 - RNA, 20 nt, Artificial Sequence
  SAMD9L targeting guide sequence portion
ggcuuauuuuuuccauucau

SEQ ID NO: 18134 - RNA, 20 nt, Artificial Sequence
  SAMD9L targeting guide sequence portion
ggcuuccucaugguaauaug

SEQ ID NO: 18135 - RNA, 20 nt, Artificial Sequence
  SAMD9L targeting guide sequence portion
gggaacaaagaggguaauga

SEQ ID NO: 18136 - RNA, 20 nt, Artificial Sequence
  SAMD9L targeting guide sequence portion
gggagaugggaucuaagaaa

SEQ ID NO: 18137 - RNA, 20 nt, Artificial Sequence
  SAMD9L targeting guide sequence portion
gggaucuaagaaacaggugg

SEQ ID NO: 18138 - RNA, 20 nt, Artificial Sequence
  SAMD9L targeting guide sequence portion
gggauggcauuccuugacac

SEQ ID NO: 18139 - RNA, 20 nt, Artificial Sequence
  SAMD9L targeting guide sequence portion
gggcuuccucaugguaauau

SEQ ID NO: 18140 - RNA, 20 nt, Artificial Sequence
  SAMD9L targeting guide sequence portion
ggggagaugggaucuaagaa

SEQ ID NO: 18141 - RNA, 20 nt, Artificial Sequence
  SAMD9L targeting guide sequence portion
ggguaaugaauggaaaaaau

SEQ ID NO: 18142 - RNA, 20 nt, Artificial Sequence
  SAMD9L targeting guide sequence portion
gguaauauguguucucaagu

SEQ ID NO: 18143 - RNA, 20 nt, Artificial Sequence
  SAMD9L targeting guide sequence portion
gguaaugaauggaaaaaaua

SEQ ID NO: 18144 - RNA, 20 nt, Artificial Sequence
  SAMD9L targeting guide sequence portion
ggucaaggaagacuuccugg

SEQ ID NO: 18145 - RNA, 20 nt, Artificial Sequence
  SAMD9L targeting guide sequence portion
ggugaaggugacucuugaaa

SEQ ID NO: 18146 - RNA, 20 nt, Artificial Sequence
  SAMD9L targeting guide sequence portion
ggugaaucucuuccuuuaag

SEQ ID NO: 18147 - RNA, 20 nt, Artificial Sequence
  SAMD9L targeting guide sequence portion
ggugacucuugaaaucaguu

SEQ ID NO: 18148 - RNA, 20 nt, Artificial Sequence
  SAMD9L targeting guide sequence portion
gguggagauaaggcuguauu

SEQ ID NO: 18149 - RNA, 20 nt, Artificial Sequence
  SAMD9L targeting guide sequence portion
gguggucaaggaagacuucc

SEQ ID NO: 18150 - RNA, 20 nt, Artificial Sequence
  SAMD9L targeting guide sequence portion
gguugagaaguaaagggaac

SEQ ID NO: 18151 - RNA, 20 nt, Artificial Sequence
  SAMD9L targeting guide sequence portion
guaaagggaacaaagagggu

SEQ ID NO: 18152 - RNA, 20 nt, Artificial Sequence
  SAMD9L targeting guide sequence portion
guaauauguguucucaaguu

SEQ ID NO: 18153 - RNA, 20 nt, Artificial Sequence
  SAMD9L targeting guide sequence portion
guaaugaauggaaaaaauaa

SEQ ID NO: 18154 - RNA, 20 nt, Artificial Sequence
  SAMD9L targeting guide sequence portion
guauauagcacagguugaga

SEQ ID NO: 18155 - RNA, 20 nt, Artificial Sequence
  SAMD9L targeting guide sequence portion
guauucacaggagacaaaaa

SEQ ID NO: 18156 - RNA, 20 nt, Artificial Sequence
  SAMD9L targeting guide sequence portion
gucaaggaagacuuccuggu

SEQ ID NO: 18157 - RNA, 20 nt, Artificial Sequence
  SAMD9L targeting guide sequence portion
gucaaggaaugccaucccag

SEQ ID NO: 18158 - RNA, 20 nt, Artificial Sequence
  SAMD9L targeting guide sequence portion
gucaccuucaccaggaaguc

SEQ ID NO: 18159 - RNA, 20 nt, Artificial Sequence
  SAMD9L targeting guide sequence portion
gucauucacaacugauuuca

SEQ ID NO: 18160 - RNA, 20 nt, Artificial Sequence
  SAMD9L targeting guide sequence portion
gucuccugugaauacagccu

SEQ ID NO: 18161 - RNA, 20 nt, Artificial Sequence
  SAMD9L targeting guide sequence portion
gucuuccuugaccaccauca

SEQ ID NO: 18162 - RNA, 20 nt, Artificial Sequence
  SAMD9L targeting guide sequence portion
gugaaacauaggcuaauaua

SEQ ID NO: 18163 - RNA, 20 nt, Artificial Sequence
  SAMD9L targeting guide sequence portion
gugaaggugacucuugaaau

SEQ ID NO: 18164 - RNA, 20 nt, Artificial Sequence
  SAMD9L targeting guide sequence portion
gugaauacagccuuaucucc

SEQ ID NO: 18165 - RNA, 20 nt, Artificial Sequence
  SAMD9L targeting guide sequence portion
gugaaucucuuccuuuaagc

SEQ ID NO: 18166 - RNA, 20 nt, Artificial Sequence
  SAMD9L targeting guide sequence portion
gugaaugacaaaucagaaua

SEQ ID NO: 18167 - RNA, 20 nt, Artificial Sequence
  SAMD9L targeting guide sequence portion
gugacucuugaaaucaguug

SEQ ID NO: 18168 - RNA, 20 nt, Artificial Sequence
  SAMD9L targeting guide sequence portion
gugcaucugagaaugagcuu

SEQ ID NO: 18169 - RNA, 20 nt, Artificial Sequence
  SAMD9L targeting guide sequence portion
gugcuauauacaugcuguuc

SEQ ID NO: 18170 - RNA, 20 nt, Artificial Sequence
  SAMD9L targeting guide sequence portion
guggagauaaggcuguauuc

SEQ ID NO: 18171 - RNA, 20 nt, Artificial Sequence
  SAMD9L targeting guide sequence portion
guggucaaggaagacuuccu

SEQ ID NO: 18172 - RNA, 20 nt, Artificial Sequence
  SAMD9L targeting guide sequence portion
gugucaaggaaugccauccc

SEQ ID NO: 18173 - RNA, 20 nt, Artificial Sequence
  SAMD9L targeting guide sequence portion
guguucucaaguuuucagug

SEQ ID NO: 18174 - RNA, 20 nt, Artificial Sequence
  SAMD9L targeting guide sequence portion
guuagauggaaauaaggcaa

SEQ ID NO: 18175 - RNA, 20 nt, Artificial Sequence
  SAMD9L targeting guide sequence portion
guucccauuuacaggugaau

SEQ ID NO: 18176 - RNA, 20 nt, Artificial Sequence
  SAMD9L targeting guide sequence portion
guucccuuuacuucucaacc

SEQ ID NO: 18177 - RNA, 20 nt, Artificial Sequence
  SAMD9L targeting guide sequence portion
guucucaaguuuucaguguc

SEQ ID NO: 18178 - RNA, 20 nt, Artificial Sequence
  SAMD9L targeting guide sequence portion
guucucucuguugagauugc

SEQ ID NO: 18179 - RNA, 20 nt, Artificial Sequence
  SAMD9L targeting guide sequence portion
guucuggcuguugugcaucu

SEQ ID NO: 18180 - RNA, 20 nt, Artificial Sequence
  SAMD9L targeting guide sequence portion
guugagaaguaaagggaaca

SEQ ID NO: 18181 - RNA, 20 nt, Artificial Sequence
  SAMD9L targeting guide sequence portion
guugagauugccuuauuucc

SEQ ID NO: 18182 - RNA, 20 nt, Artificial Sequence
  SAMD9L targeting guide sequence portion
guugugaaugacaaaucaga

SEQ ID NO: 18183 - RNA, 20 nt, Artificial Sequence
  SAMD9L targeting guide sequence portion
guugugcaucugagaaugag

SEQ ID NO: 18184 - RNA, 20 nt, Artificial Sequence
  SAMD9L targeting guide sequence portion
guuucacuuuauaggcaaug

SEQ ID NO: 18185 - RNA, 20 nt, Artificial Sequence
  SAMD9L targeting guide sequence portion
guuucuuagaucccaucucc

SEQ ID NO: 18186 - RNA, 20 nt, Artificial Sequence
  SAMD9L targeting guide sequence portion
guuuucagugucaaggaaug

SEQ ID NO: 18187 - RNA, 20 nt, Artificial Sequence
  SAMD9L targeting guide sequence portion
uaaaggaagagauucaccug

SEQ ID NO: 18188 - RNA, 20 nt, Artificial Sequence
  SAMD9L targeting guide sequence portion
uaaagggaacaaagagggua

SEQ ID NO: 18189 - RNA, 20 nt, Artificial Sequence
  SAMD9L targeting guide sequence portion
uaaagugaaacauaggcuaa

SEQ ID NO: 18190 - RNA, 20 nt, Artificial Sequence
  SAMD9L targeting guide sequence portion
uaaauugaauauugaauaaa

SEQ ID NO: 18191 - RNA, 20 nt, Artificial Sequence
  SAMD9L targeting guide sequence portion
uaacauucucucuccugcua

SEQ ID NO: 18192 - RNA, 20 nt, Artificial Sequence
  SAMD9L targeting guide sequence portion
uaagaaacagguggagauaa

SEQ ID NO: 18193 - RNA, 20 nt, Artificial Sequence
  SAMD9L targeting guide sequence portion
uaagaacuacgcauugccua

SEQ ID NO: 18194 - RNA, 20 nt, Artificial Sequence
  SAMD9L targeting guide sequence portion
uaagccaggggagaugggau

SEQ ID NO: 18195 - RNA, 20 nt, Artificial Sequence
  SAMD9L targeting guide sequence portion
uaagccauuuuugucuccug

SEQ ID NO: 18196 - RNA, 20 nt, Artificial Sequence
  SAMD9L targeting guide sequence portion
uaaggcaaucucaacagaga

SEQ ID NO: 18197 - RNA, 20 nt, Artificial Sequence
  SAMD9L targeting guide sequence portion
uaaggcuguauucacaggag

SEQ ID NO: 18198 - RNA, 20 nt, Artificial Sequence
  SAMD9L targeting guide sequence portion
uaauauagauuaaauugaau

SEQ ID NO: 18199 - RNA, 20 nt, Artificial Sequence
  SAMD9L targeting guide sequence portion
uaauauguguucucaaguuu

SEQ ID NO: 18200 - RNA, 20 nt, Artificial Sequence
  SAMD9L targeting guide sequence portion
uaaucaggcaggaaugaugg

SEQ ID NO: 18201 - RNA, 20 nt, Artificial Sequence
  SAMD9L targeting guide sequence portion
uaaucuauauuagccuaugu

SEQ ID NO: 18202 - RNA, 20 nt, Artificial Sequence
  SAMD9L targeting guide sequence portion
uaaugaauggaaaaaauaag

SEQ ID NO: 18203 - RNA, 20 nt, Artificial Sequence
  SAMD9L targeting guide sequence portion
uacagccuuaucuccaccug

SEQ ID NO: 18204 - RNA, 20 nt, Artificial Sequence
  SAMD9L targeting guide sequence portion
uacaggugaaucucuuccuu

SEQ ID NO: 18205 - RNA, 20 nt, Artificial Sequence
  SAMD9L targeting guide sequence portion
uacaugcuguucucucuguu

SEQ ID NO: 18206 - RNA, 20 nt, Artificial Sequence
  SAMD9L targeting guide sequence portion
uaccaugaggaagcccucua

SEQ ID NO: 18207 - RNA, 20 nt, Artificial Sequence
  SAMD9L targeting guide sequence portion
uacccucuuuguucccuuua

SEQ ID NO: 18208 - RNA, 20 nt, Artificial Sequence
  SAMD9L targeting guide sequence portion
uacgcauugccuauaaagug

SEQ ID NO: 18209 - RNA, 20 nt, Artificial Sequence
  SAMD9L targeting guide sequence portion
uacuucucaaccugugcuau

SEQ ID NO: 18210 - RNA, 20 nt, Artificial Sequence
  SAMD9L targeting guide sequence portion
uagaaugcugcuugagacug

SEQ ID NO: 18211 - RNA, 20 nt, Artificial Sequence
  SAMD9L targeting guide sequence portion
uagagggcuuccucauggua

SEQ ID NO: 18212 - RNA, 20 nt, Artificial Sequence
  SAMD9L targeting guide sequence portion
uagaucccaucuccccuggc

SEQ ID NO: 18213 - RNA, 20 nt, Artificial Sequence
  SAMD9L targeting guide sequence portion
uagauggaaauaaggcaauc

SEQ ID NO: 18214 - RNA, 20 nt, Artificial Sequence
  SAMD9L targeting guide sequence portion
uagauuaaauugaauauuga

SEQ ID NO: 18215 - RNA, 20 nt, Artificial Sequence
  SAMD9L targeting guide sequence portion
uagcacagguugagaaguaa

SEQ ID NO: 18216 - RNA, 20 nt, Artificial Sequence
  SAMD9L targeting guide sequence portion
uagcaggagagagaauguua

SEQ ID NO: 18217 - RNA, 20 nt, Artificial Sequence
  SAMD9L targeting guide sequence portion
uagccuauguuucacuuuau

SEQ ID NO: 18218 - RNA, 20 nt, Artificial Sequence
  SAMD9L targeting guide sequence portion
uaggcaaugcguaguucuua

SEQ ID NO: 18219 - RNA, 20 nt, Artificial Sequence
  SAMD9L targeting guide sequence portion
uaggcuaauauagauuaaau

SEQ ID NO: 18220 - RNA, 20 nt, Artificial Sequence
  SAMD9L targeting guide sequence portion
uauaaagugaaacauaggcu

SEQ ID NO: 18221 - RNA, 20 nt, Artificial Sequence
  SAMD9L targeting guide sequence portion
uauacaugcuguucucucug

SEQ ID NO: 18222 - RNA, 20 nt, Artificial Sequence
  SAMD9L targeting guide sequence portion
uauagauuaaauugaauauu

SEQ ID NO: 18223 - RNA, 20 nt, Artificial Sequence
  SAMD9L targeting guide sequence portion
uauagcacagguugagaagu

SEQ ID NO: 18224 - RNA, 20 nt, Artificial Sequence
  SAMD9L targeting guide sequence portion
uauaggcaaugcguaguucu

SEQ ID NO: 18225 - RNA, 20 nt, Artificial Sequence
  SAMD9L targeting guide sequence portion
uauauacaugcuguucucuc

SEQ ID NO: 18226 - RNA, 20 nt, Artificial Sequence
  SAMD9L targeting guide sequence portion
uauauagcacagguugagaa

SEQ ID NO: 18227 - RNA, 20 nt, Artificial Sequence
  SAMD9L targeting guide sequence portion
uauauuagccuauguuucac

SEQ ID NO: 18228 - RNA, 20 nt, Artificial Sequence
  SAMD9L targeting guide sequence portion
uauauuuuuuauucaauauu

SEQ ID NO: 18229 - RNA, 20 nt, Artificial Sequence
  SAMD9L targeting guide sequence portion
uaucuccaccuguuucuuag

SEQ ID NO: 18230 - RNA, 20 nt, Artificial Sequence
  SAMD9L targeting guide sequence portion
uauguguucucaaguuuuca

SEQ ID NO: 18231 - RNA, 20 nt, Artificial Sequence
  SAMD9L targeting guide sequence portion
uauguuucacuuuauaggca

SEQ ID NO: 18232 - RNA, 20 nt, Artificial Sequence
  SAMD9L targeting guide sequence portion
uauuaccaugaggaagcccu

SEQ ID NO: 18233 - RNA, 20 nt, Artificial Sequence
  SAMD9L targeting guide sequence portion
uauuagccuauguuucacuu

SEQ ID NO: 18234 - RNA, 20 nt, Artificial Sequence
  SAMD9L targeting guide sequence portion
uauucaauauucaauuuaau

SEQ ID NO: 18235 - RNA, 20 nt, Artificial Sequence
  SAMD9L targeting guide sequence portion
uauucaauuuaaucuauauu

SEQ ID NO: 18236 - RNA, 20 nt, Artificial Sequence
  SAMD9L targeting guide sequence portion
uauucacaggagacaaaaau

SEQ ID NO: 18237 - RNA, 20 nt, Artificial Sequence
  SAMD9L targeting guide sequence portion
uauucugauuugucauucac

SEQ ID NO: 18238 - RNA, 20 nt, Artificial Sequence
  SAMD9L targeting guide sequence portion
uauuuccaucuaacauucuc

SEQ ID NO: 18239 - RNA, 20 nt, Artificial Sequence
  SAMD9L targeting guide sequence portion
uauuuuuuauucaauauuca

SEQ ID NO: 18240 - RNA, 20 nt, Artificial Sequence
  SAMD9L targeting guide sequence portion
uauuuuuuccauucauuacc

SEQ ID NO: 18241 - RNA, 20 nt, Artificial Sequence
  SAMD9L targeting guide sequence portion
ucaacagagagaacagcaug

SEQ ID NO: 18242 - RNA, 20 nt, Artificial Sequence
  SAMD9L targeting guide sequence portion
ucaaccugugcuauauacau

SEQ ID NO: 18243 - RNA, 20 nt, Artificial Sequence
  SAMD9L targeting guide sequence portion
ucaagagucaccuucaccag

SEQ ID NO: 18244 - RNA, 20 nt, Artificial Sequence
  SAMD9L targeting guide sequence portion
ucaaggaagacuuccuggug

SEQ ID NO: 18245 - RNA, 20 nt, Artificial Sequence
  SAMD9L targeting guide sequence portion
ucaaggaaugccaucccaga

SEQ ID NO: 18246 - RNA, 20 nt, Artificial Sequence
  SAMD9L targeting guide sequence portion
ucaaguuuucagugucaagg

SEQ ID NO: 18247 - RNA, 20 nt, Artificial Sequence
  SAMD9L targeting guide sequence portion
ucaauauucaauuuaaucua

SEQ ID NO: 18248 - RNA, 20 nt, Artificial Sequence
  SAMD9L targeting guide sequence portion
ucaauuuaaucuauauuagc

SEQ ID NO: 18249 - RNA, 20 nt, Artificial Sequence
  SAMD9L targeting guide sequence portion
ucacaacugauuucaagagu

SEQ ID NO: 18250 - RNA, 20 nt, Artificial Sequence
  SAMD9L targeting guide sequence portion
ucacaggagacaaaaauggc

SEQ ID NO: 18251 - RNA, 20 nt, Artificial Sequence
  SAMD9L targeting guide sequence portion
ucaccaggaagucuuccuug

SEQ ID NO: 18252 - RNA, 20 nt, Artificial Sequence
  SAMD9L targeting guide sequence portion
ucaccuucaccaggaagucu

SEQ ID NO: 18253 - RNA, 20 nt, Artificial Sequence
  SAMD9L targeting guide sequence portion
ucacuuuauaggcaaugcgu

SEQ ID NO: 18254 - RNA, 20 nt, Artificial Sequence
  SAMD9L targeting guide sequence portion
ucagaauagcaggagagaga

SEQ ID NO: 18255 - RNA, 20 nt, Artificial Sequence
  SAMD9L targeting guide sequence portion
ucagaugcacaacagccaga

SEQ ID NO: 18256 - RNA, 20 nt, Artificial Sequence
  SAMD9L targeting guide sequence portion
ucaggcaggaaugauggugg

SEQ ID NO: 18257 - RNA, 20 nt, Artificial Sequence
  SAMD9L targeting guide sequence portion
ucagugucaaggaaugccau

SEQ ID NO: 18258 - RNA, 20 nt, Artificial Sequence
  SAMD9L targeting guide sequence portion
ucaguugugaaugacaaauc

SEQ ID NO: 18259 - RNA, 20 nt, Artificial Sequence
  SAMD9L targeting guide sequence portion
ucaugguaauauguguucuc

SEQ ID NO: 18260 - RNA, 20 nt, Artificial Sequence
  SAMD9L targeting guide sequence portion
ucauuacccucuuuguuccc

SEQ ID NO: 18261 - RNA, 20 nt, Artificial Sequence
  SAMD9L targeting guide sequence portion
ucauucacaacugauuucaa

SEQ ID NO: 18262 - RNA, 20 nt, Artificial Sequence
  SAMD9L targeting guide sequence portion
ucauuccugccugauuagag

SEQ ID NO: 18263 - RNA, 20 nt, Artificial Sequence
  SAMD9L targeting guide sequence portion
ucauucucagaugcacaaca

SEQ ID NO: 18264 - RNA, 20 nt, Artificial Sequence
  SAMD9L targeting guide sequence portion
uccaccuguuucuuagaucc

SEQ ID NO: 18265 - RNA, 20 nt, Artificial Sequence
  SAMD9L targeting guide sequence portion
uccaucuaacauucucucuc

SEQ ID NO: 18266 - RNA, 20 nt, Artificial Sequence
  SAMD9L targeting guide sequence portion
uccauucauuacccucuuug

SEQ ID NO: 18267 - RNA, 20 nt, Artificial Sequence
  SAMD9L targeting guide sequence portion
ucccagaagcucauucucag

SEQ ID NO: 18268 - RNA, 20 nt, Artificial Sequence
  SAMD9L targeting guide sequence portion
ucccaucuccccuggcuuau

SEQ ID NO: 18269 - RNA, 20 nt, Artificial Sequence
  SAMD9L targeting guide sequence portion
ucccauuuacaggugaaucu

SEQ ID NO: 18270 - RNA, 20 nt, Artificial Sequence
  SAMD9L targeting guide sequence portion
uccccuggcuuauuuuuucc

SEQ ID NO: 18271 - RNA, 20 nt, Artificial Sequence
  SAMD9L targeting guide sequence portion
ucccuuuacuucucaaccug

SEQ ID NO: 18272 - RNA, 20 nt, Artificial Sequence
  SAMD9L targeting guide sequence portion
uccucaugguaauauguguu

SEQ ID NO: 18273 - RNA, 20 nt, Artificial Sequence
  SAMD9L targeting guide sequence portion
uccugccugauuagagggcu

SEQ ID NO: 18274 - RNA, 20 nt, Artificial Sequence
  SAMD9L targeting guide sequence portion
uccugcuauucugauuuguc

SEQ ID NO: 18275 - RNA, 20 nt, Artificial Sequence
  SAMD9L targeting guide sequence portion
uccuggugaaggugacucuu

SEQ ID NO: 18276 - RNA, 20 nt, Artificial Sequence
  SAMD9L targeting guide sequence portion
uccugugaauacagccuuau

SEQ ID NO: 18277 - RNA, 20 nt, Artificial Sequence
  SAMD9L targeting guide sequence portion
uccuugacacugaaaacuug

SEQ ID NO: 18278 - RNA, 20 nt, Artificial Sequence
  SAMD9L targeting guide sequence portion
uccuugaccaccaucauucc

SEQ ID NO: 18279 - RNA, 20 nt, Artificial Sequence
  SAMD9L targeting guide sequence portion
uccuuuaagccauuuuuguc

SEQ ID NO: 18280 - RNA, 20 nt, Artificial Sequence
  SAMD9L targeting guide sequence portion
ucuaacauucucucuccugc

SEQ ID NO: 18281 - RNA, 20 nt, Artificial Sequence
  SAMD9L targeting guide sequence portion
ucuaagaaacagguggagau

SEQ ID NO: 18282 - RNA, 20 nt, Artificial Sequence
  SAMD9L targeting guide sequence portion
ucuaaucaggcaggaaugau

SEQ ID NO: 18283 - RNA, 20 nt, Artificial Sequence
  SAMD9L targeting guide sequence portion
ucuagaaugcugcuugagac

SEQ ID NO: 18284 - RNA, 20 nt, Artificial Sequence
  SAMD9L targeting guide sequence portion
ucuauauuagccuauguuuc

SEQ ID NO: 18285 - RNA, 20 nt, Artificial Sequence
  SAMD9L targeting guide sequence portion
ucucaacagagagaacagca

SEQ ID NO: 18286 - RNA, 20 nt, Artificial Sequence
  SAMD9L targeting guide sequence portion
ucucaaccugugcuauauac

SEQ ID NO: 18287 - RNA, 20 nt, Artificial Sequence
  SAMD9L targeting guide sequence portion
ucucaaguuuucagugucaa

SEQ ID NO: 18288 - RNA, 20 nt, Artificial Sequence
  SAMD9L targeting guide sequence portion
ucucagaugcacaacagcca

SEQ ID NO: 18289 - RNA, 20 nt, Artificial Sequence
  SAMD9L targeting guide sequence portion
ucuccaccuguuucuuagau

SEQ ID NO: 18290 - RNA, 20 nt, Artificial Sequence
  SAMD9L targeting guide sequence portion
ucuccccuggcuuauuuuuu

SEQ ID NO: 18291 - RNA, 20 nt, Artificial Sequence
  SAMD9L targeting guide sequence portion
ucuccugcuauucugauuug

SEQ ID NO: 18292 - RNA, 20 nt, Artificial Sequence
  SAMD9L targeting guide sequence portion
ucuccugugaauacagccuu

SEQ ID NO: 18293 - RNA, 20 nt, Artificial Sequence
  SAMD9L targeting guide sequence portion
ucucuccugcuauucugauu

SEQ ID NO: 18294 - RNA, 20 nt, Artificial Sequence
  SAMD9L targeting guide sequence portion
ucucucuccugcuauucuga

SEQ ID NO: 18295 - RNA, 20 nt, Artificial Sequence
  SAMD9L targeting guide sequence portion
ucucucuguugagauugccu

SEQ ID NO: 18296 - RNA, 20 nt, Artificial Sequence
  SAMD9L targeting guide sequence portion
ucucuguugagauugccuua

SEQ ID NO: 18297 - RNA, 20 nt, Artificial Sequence
  SAMD9L targeting guide sequence portion
ucucuuccuuuaagccauuu

SEQ ID NO: 18298 - RNA, 20 nt, Artificial Sequence
  SAMD9L targeting guide sequence portion
ucugagaaugagcuucuggg

SEQ ID NO: 18299 - RNA, 20 nt, Artificial Sequence
  SAMD9L targeting guide sequence portion
ucugauuugucauucacaac

SEQ ID NO: 18300 - RNA, 20 nt, Artificial Sequence
  SAMD9L targeting guide sequence portion
ucuggcuguugugcaucuga

SEQ ID NO: 18301 - RNA, 20 nt, Artificial Sequence
  SAMD9L targeting guide sequence portion
ucugggauggcauuccuuga

SEQ ID NO: 18302 - RNA, 20 nt, Artificial Sequence
  SAMD9L targeting guide sequence portion
ucuguugagauugccuuauu

SEQ ID NO: 18303 - RNA, 20 nt, Artificial Sequence
  SAMD9L targeting guide sequence portion
ucuuagaucccaucuccccu

SEQ ID NO: 18304 - RNA, 20 nt, Artificial Sequence
  SAMD9L targeting guide sequence portion
ucuuccuugaccaccaucau

SEQ ID NO: 18305 - RNA, 20 nt, Artificial Sequence
  SAMD9L targeting guide sequence portion
ucuuccuuuaagccauuuuu

SEQ ID NO: 18306 - RNA, 20 nt, Artificial Sequence
  SAMD9L targeting guide sequence portion
ucuugaaaucaguugugaau

SEQ ID NO: 18307 - RNA, 20 nt, Artificial Sequence
  SAMD9L targeting guide sequence portion
ucuuguucccauuuacaggu

SEQ ID NO: 18308 - RNA, 20 nt, Artificial Sequence
  SAMD9L targeting guide sequence portion
ucuuuguucccuuuacuucu

SEQ ID NO: 18309 - RNA, 20 nt, Artificial Sequence
  SAMD9L targeting guide sequence portion
ugaaaacuugagaacacaua

SEQ ID NO: 18310 - RNA, 20 nt, Artificial Sequence
  SAMD9L targeting guide sequence portion
ugaaacauaggcuaauauag

SEQ ID NO: 18311 - RNA, 20 nt, Artificial Sequence
  SAMD9L targeting guide sequence portion
ugaaaucaguugugaaugac

SEQ ID NO: 18312 - RNA, 20 nt, Artificial Sequence
  SAMD9L targeting guide sequence portion
ugaaggugacucuugaaauc

SEQ ID NO: 18313 - RNA, 20 nt, Artificial Sequence
  SAMD9L targeting guide sequence portion
ugaauacagccuuaucucca

SEQ ID NO: 18314 - RNA, 20 nt, Artificial Sequence
  SAMD9L targeting guide sequence portion
ugaaucucuuccuuuaagcc

SEQ ID NO: 18315 - RNA, 20 nt, Artificial Sequence
  SAMD9L targeting guide sequence portion
ugaaugacaaaucagaauag

SEQ ID NO: 18316 - RNA, 20 nt, Artificial Sequence
  SAMD9L targeting guide sequence portion
ugaauggaaaaaauaagcca

SEQ ID NO: 18317 - RNA, 20 nt, Artificial Sequence
  SAMD9L targeting guide sequence portion
ugacaaaucagaauagcagg

SEQ ID NO: 18318 - RNA, 20 nt, Artificial Sequence
  SAMD9L targeting guide sequence portion
ugacacugaaaacuugagaa

SEQ ID NO: 18319 - RNA, 20 nt, Artificial Sequence
  SAMD9L targeting guide sequence portion
ugaccaccaucauuccugcc

SEQ ID NO: 18320 - RNA, 20 nt, Artificial Sequence
  SAMD9L targeting guide sequence portion
ugacucuugaaaucaguugu

SEQ ID NO: 18321 - RNA, 20 nt, Artificial Sequence
  SAMD9L targeting guide sequence portion
ugagaacacauauuaccaug

SEQ ID NO: 18322 - RNA, 20 nt, Artificial Sequence
  SAMD9L targeting guide sequence portion
ugagaaguaaagggaacaaa

SEQ ID NO: 18323 - RNA, 20 nt, Artificial Sequence
  SAMD9L targeting guide sequence portion
ugagaaugagcuucugggau

SEQ ID NO: 18324 - RNA, 20 nt, Artificial Sequence
  SAMD9L targeting guide sequence portion
ugagacuguucuggcuguug

SEQ ID NO: 18325 - RNA, 20 nt, Artificial Sequence
  SAMD9L targeting guide sequence portion
ugagauugccuuauuuccau

SEQ ID NO: 18326 - RNA, 20 nt, Artificial Sequence
  SAMD9L targeting guide sequence portion
ugagcuucugggauggcauu

SEQ ID NO: 18327 - RNA, 20 nt, Artificial Sequence
  SAMD9L targeting guide sequence portion
ugaggaagcccucuaaucag

SEQ ID NO: 18328 - RNA, 20 nt, Artificial Sequence
  SAMD9L targeting guide sequence portion
ugaugguggucaaggaagac

SEQ ID NO: 18329 - RNA, 20 nt, Artificial Sequence
  SAMD9L targeting guide sequence portion
ugauuagagggcuuccucau

SEQ ID NO: 18330 - RNA, 20 nt, Artificial Sequence
  SAMD9L targeting guide sequence portion
ugauuucaagagucaccuuc

SEQ ID NO: 18331 - RNA, 20 nt, Artificial Sequence
  SAMD9L targeting guide sequence portion
ugauuugucauucacaacug

SEQ ID NO: 18332 - RNA, 20 nt, Artificial Sequence
  SAMD9L targeting guide sequence portion
ugcacaacagccagaacagu

SEQ ID NO: 18333 - RNA, 20 nt, Artificial Sequence
  SAMD9L targeting guide sequence portion
ugcaucugagaaugagcuuc

SEQ ID NO: 18334 - RNA, 20 nt, Artificial Sequence
  SAMD9L targeting guide sequence portion
ugccaucccagaagcucauu

SEQ ID NO: 18335 - RNA, 20 nt, Artificial Sequence
  SAMD9L targeting guide sequence portion
ugccuauaaagugaaacaua

SEQ ID NO: 18336 - RNA, 20 nt, Artificial Sequence
  SAMD9L targeting guide sequence portion
ugccugauuagagggcuucc

SEQ ID NO: 18337 - RNA, 20 nt, Artificial Sequence
  SAMD9L targeting guide sequence portion
ugccuuauuuccaucuaaca

SEQ ID NO: 18338 - RNA, 20 nt, Artificial Sequence
  SAMD9L targeting guide sequence portion
ugcuauauacaugcuguucu

SEQ ID NO: 18339 - RNA, 20 nt, Artificial Sequence
  SAMD9L targeting guide sequence portion
ugcuauucugauuugucauu

SEQ ID NO: 18340 - RNA, 20 nt, Artificial Sequence
  SAMD9L targeting guide sequence portion
ugcugcuugagacuguucug

SEQ ID NO: 18341 - RNA, 20 nt, Artificial Sequence
  SAMD9L targeting guide sequence portion
ugcuguucucucuguugaga

SEQ ID NO: 18342 - RNA, 20 nt, Artificial Sequence
  SAMD9L targeting guide sequence portion
ugcuugagacuguucuggcu

SEQ ID NO: 18343 - RNA, 20 nt, Artificial Sequence
  SAMD9L targeting guide sequence portion
uggaaaaaauaagccagggg

SEQ ID NO: 18344 - RNA, 20 nt, Artificial Sequence
  SAMD9L targeting guide sequence portion
uggaaauaaggcaaucucaa

SEQ ID NO: 18345 - RNA, 20 nt, Artificial Sequence
  SAMD9L targeting guide sequence portion
uggaauuuaagaacuacgca

SEQ ID NO: 18346 - RNA, 20 nt, Artificial Sequence
  SAMD9L targeting guide sequence portion
uggagauaaggcuguauuca

SEQ ID NO: 18347 - RNA, 20 nt, Artificial Sequence
  SAMD9L targeting guide sequence portion
uggcauuccuugacacugaa

SEQ ID NO: 18348 - RNA, 20 nt, Artificial Sequence
  SAMD9L targeting guide sequence portion
uggcuguugugcaucugaga

SEQ ID NO: 18349 - RNA, 20 nt, Artificial Sequence
  SAMD9L targeting guide sequence portion
uggcuuaaaggaagagauuc

SEQ ID NO: 18350 - RNA, 20 nt, Artificial Sequence
  SAMD9L targeting guide sequence portion
uggcuuauuuuuuccauuca

SEQ ID NO: 18351 - RNA, 20 nt, Artificial Sequence
  SAMD9L targeting guide sequence portion
ugggaucuaagaaacaggug

SEQ ID NO: 18352 - RNA, 20 nt, Artificial Sequence
  SAMD9L targeting guide sequence portion
ugggauggcauuccuugaca

SEQ ID NO: 18353 - RNA, 20 nt, Artificial Sequence
  SAMD9L targeting guide sequence portion
ugguaauauguguucucaag

SEQ ID NO: 18354 - RNA, 20 nt, Artificial Sequence
  SAMD9L targeting guide sequence portion
uggucaaggaagacuuccug

SEQ ID NO: 18355 - RNA, 20 nt, Artificial Sequence
  SAMD9L targeting guide sequence portion
uggugaaggugacucuugaa

SEQ ID NO: 18356 - RNA, 20 nt, Artificial Sequence
  SAMD9L targeting guide sequence portion
ugguggucaaggaagacuuc

SEQ ID NO: 18357 - RNA, 20 nt, Artificial Sequence
  SAMD9L targeting guide sequence portion
uguauauagcacagguugag

SEQ ID NO: 18358 - RNA, 20 nt, Artificial Sequence
  SAMD9L targeting guide sequence portion
uguauucacaggagacaaaa

SEQ ID NO: 18359 - RNA, 20 nt, Artificial Sequence
  SAMD9L targeting guide sequence portion
ugucaaggaaugccauccca

SEQ ID NO: 18360 - RNA, 20 nt, Artificial Sequence
  SAMD9L targeting guide sequence portion
ugucauucacaacugauuuc

SEQ ID NO: 18361 - RNA, 20 nt, Artificial Sequence
  SAMD9L targeting guide sequence portion
ugucuccugugaauacagcc

SEQ ID NO: 18362 - RNA, 20 nt, Artificial Sequence
  SAMD9L targeting guide sequence portion
ugugaauacagccuuaucuc

SEQ ID NO: 18363 - RNA, 20 nt, Artificial Sequence
  SAMD9L targeting guide sequence portion
ugugaaugacaaaucagaau

SEQ ID NO: 18364 - RNA, 20 nt, Artificial Sequence
  SAMD9L targeting guide sequence portion
ugugcaucugagaaugagcu

SEQ ID NO: 18365 - RNA, 20 nt, Artificial Sequence
  SAMD9L targeting guide sequence portion
ugugcuauauacaugcuguu

SEQ ID NO: 18366 - RNA, 20 nt, Artificial Sequence
  SAMD9L targeting guide sequence portion
uguguucucaaguuuucagu

SEQ ID NO: 18367 - RNA, 20 nt, Artificial Sequence
  SAMD9L targeting guide sequence portion
uguuagauggaaauaaggca

SEQ ID NO: 18368 - RNA, 20 nt, Artificial Sequence
  SAMD9L targeting guide sequence portion
uguucccauuuacaggugaa

SEQ ID NO: 18369 - RNA, 20 nt, Artificial Sequence
  SAMD9L targeting guide sequence portion
uguucccuuuacuucucaac

SEQ ID NO: 18370 - RNA, 20 nt, Artificial Sequence
  SAMD9L targeting guide sequence portion
uguucucaaguuuucagugu

SEQ ID NO: 18371 - RNA, 20 nt, Artificial Sequence
  SAMD9L targeting guide sequence portion
uguucucucuguugagauug

SEQ ID NO: 18372 - RNA, 20 nt, Artificial Sequence
  SAMD9L targeting guide sequence portion
uguucuggcuguugugcauc

SEQ ID NO: 18373 - RNA, 20 nt, Artificial Sequence
  SAMD9L targeting guide sequence portion
uguugagauugccuuauuuc

SEQ ID NO: 18374 - RNA, 20 nt, Artificial Sequence
  SAMD9L targeting guide sequence portion
uguugugcaucugagaauga

SEQ ID NO: 18375 - RNA, 20 nt, Artificial Sequence
  SAMD9L targeting guide sequence portion
uguuucacuuuauaggcaau

SEQ ID NO: 18376 - RNA, 20 nt, Artificial Sequence
  SAMD9L targeting guide sequence portion
uguuucuuagaucccaucuc

SEQ ID NO: 18377 - RNA, 20 nt, Artificial Sequence
  SAMD9L targeting guide sequence portion
uuaaaggaagagauucaccu

SEQ ID NO: 18378 - RNA, 20 nt, Artificial Sequence
  SAMD9L targeting guide sequence portion
uuaaauugaauauugaauaa

SEQ ID NO: 18379 - RNA, 20 nt, Artificial Sequence
  SAMD9L targeting guide sequence portion
uuaagaacuacgcauugccu

SEQ ID NO: 18380 - RNA, 20 nt, Artificial Sequence
  SAMD9L targeting guide sequence portion
uuaagccauuuuugucuccu

SEQ ID NO: 18381 - RNA, 20 nt, Artificial Sequence
  SAMD9L targeting guide sequence portion
uuaaucuauauuagccuaug

SEQ ID NO: 18382 - RNA, 20 nt, Artificial Sequence
  SAMD9L targeting guide sequence portion
uuacaggugaaucucuuccu

SEQ ID NO: 18383 - RNA, 20 nt, Artificial Sequence
  SAMD9L targeting guide sequence portion
uuaccaugaggaagcccucu

SEQ ID NO: 18384 - RNA, 20 nt, Artificial Sequence
  SAMD9L targeting guide sequence portion
uuacccucuuuguucccuuu

SEQ ID NO: 18385 - RNA, 20 nt, Artificial Sequence
  SAMD9L targeting guide sequence portion
uuacuucucaaccugugcua

SEQ ID NO: 18386 - RNA, 20 nt, Artificial Sequence
  SAMD9L targeting guide sequence portion
uuagagggcuuccucauggu

SEQ ID NO: 18387 - RNA, 20 nt, Artificial Sequence
  SAMD9L targeting guide sequence portion
uuagaucccaucuccccugg

SEQ ID NO: 18388 - RNA, 20 nt, Artificial Sequence
  SAMD9L targeting guide sequence portion
uuagauggaaauaaggcaau

SEQ ID NO: 18389 - RNA, 20 nt, Artificial Sequence
  SAMD9L targeting guide sequence portion
uuagccuauguuucacuuua

SEQ ID NO: 18390 - RNA, 20 nt, Artificial Sequence
  SAMD9L targeting guide sequence portion
uuauaggcaaugcguaguuc

SEQ ID NO: 18391 - RNA, 20 nt, Artificial Sequence
  SAMD9L targeting guide sequence portion
uuaucuccaccuguuucuua

SEQ ID NO: 18392 - RNA, 20 nt, Artificial Sequence
  SAMD9L targeting guide sequence portion
uuauucaauauucaauuuaa

SEQ ID NO: 18393 - RNA, 20 nt, Artificial Sequence
  SAMD9L targeting guide sequence portion
uuauuuccaucuaacauucu

SEQ ID NO: 18394 - RNA, 20 nt, Artificial Sequence
  SAMD9L targeting guide sequence portion
uuauuuuuuccauucauuac

SEQ ID NO: 18395 - RNA, 20 nt, Artificial Sequence
  SAMD9L targeting guide sequence portion
uucaagagucaccuucacca

SEQ ID NO: 18396 - RNA, 20 nt, Artificial Sequence
  SAMD9L targeting guide sequence portion
uucaauauucaauuuaaucu

SEQ ID NO: 18397 - RNA, 20 nt, Artificial Sequence
  SAMD9L targeting guide sequence portion
uucaauuuaaucuauauuag

SEQ ID NO: 18398 - RNA, 20 nt, Artificial Sequence
  SAMD9L targeting guide sequence portion
uucacaacugauuucaagag

SEQ ID NO: 18399 - RNA, 20 nt, Artificial Sequence
  SAMD9L targeting guide sequence portion
uucacaggagacaaaaaugg

SEQ ID NO: 18400 - RNA, 20 nt, Artificial Sequence
  SAMD9L targeting guide sequence portion
uucaccaggaagucuuccuu

SEQ ID NO: 18401 - RNA, 20 nt, Artificial Sequence
  SAMD9L targeting guide sequence portion
uucacuuuauaggcaaugcg

SEQ ID NO: 18402 - RNA, 20 nt, Artificial Sequence
  SAMD9L targeting guide sequence portion
uucagugucaaggaaugcca

SEQ ID NO: 18403 - RNA, 20 nt, Artificial Sequence
  SAMD9L targeting guide sequence portion
uucauuacccucuuuguucc

SEQ ID NO: 18404 - RNA, 20 nt, Artificial Sequence
  SAMD9L targeting guide sequence portion
uuccaucuaacauucucucu

SEQ ID NO: 18405 - RNA, 20 nt, Artificial Sequence
  SAMD9L targeting guide sequence portion
uuccauucauuacccucuuu

SEQ ID NO: 18406 - RNA, 20 nt, Artificial Sequence
  SAMD9L targeting guide sequence portion
uucccauuuacaggugaauc

SEQ ID NO: 18407 - RNA, 20 nt, Artificial Sequence
  SAMD9L targeting guide sequence portion
uucccuuuacuucucaaccu

SEQ ID NO: 18408 - RNA, 20 nt, Artificial Sequence
  SAMD9L targeting guide sequence portion
uuccucaugguaauaugugu

SEQ ID NO: 18409 - RNA, 20 nt, Artificial Sequence
  SAMD9L targeting guide sequence portion
uuccugccugauuagagggc

SEQ ID NO: 18410 - RNA, 20 nt, Artificial Sequence
  SAMD9L targeting guide sequence portion
uuccuggugaaggugacucu

SEQ ID NO: 18411 - RNA, 20 nt, Artificial Sequence
  SAMD9L targeting guide sequence portion
uuccuugacacugaaaacuu

SEQ ID NO: 18412 - RNA, 20 nt, Artificial Sequence
  SAMD9L targeting guide sequence portion
uuccuugaccaccaucauuc

SEQ ID NO: 18413 - RNA, 20 nt, Artificial Sequence
  SAMD9L targeting guide sequence portion
uuccuuuaagccauuuuugu

SEQ ID NO: 18414 - RNA, 20 nt, Artificial Sequence
  SAMD9L targeting guide sequence portion
uucucaaccugugcuauaua

SEQ ID NO: 18415 - RNA, 20 nt, Artificial Sequence
  SAMD9L targeting guide sequence portion
uucucaaguuuucaguguca

SEQ ID NO: 18416 - RNA, 20 nt, Artificial Sequence
  SAMD9L targeting guide sequence portion
uucucagaugcacaacagcc

SEQ ID NO: 18417 - RNA, 20 nt, Artificial Sequence
  SAMD9L targeting guide sequence portion
uucucucuccugcuauucug

SEQ ID NO: 18418 - RNA, 20 nt, Artificial Sequence
  SAMD9L targeting guide sequence portion
uucucucuguugagauugcc

SEQ ID NO: 18419 - RNA, 20 nt, Artificial Sequence
  SAMD9L targeting guide sequence portion
uucugauuugucauucacaa

SEQ ID NO: 18420 - RNA, 20 nt, Artificial Sequence
  SAMD9L targeting guide sequence portion
uucuggcuguugugcaucug

SEQ ID NO: 18421 - RNA, 20 nt, Artificial Sequence
  SAMD9L targeting guide sequence portion
uucugggauggcauuccuug

SEQ ID NO: 18422 - RNA, 20 nt, Artificial Sequence
  SAMD9L targeting guide sequence portion
uucuuagaucccaucucccc

SEQ ID NO: 18423 - RNA, 20 nt, Artificial Sequence
  SAMD9L targeting guide sequence portion
uugaaaucaguugugaauga

SEQ ID NO: 18424 - RNA, 20 nt, Artificial Sequence
  SAMD9L targeting guide sequence portion
uugacacugaaaacuugaga

SEQ ID NO: 18425 - RNA, 20 nt, Artificial Sequence
  SAMD9L targeting guide sequence portion
uugaccaccaucauuccugc

SEQ ID NO: 18426 - RNA, 20 nt, Artificial Sequence
  SAMD9L targeting guide sequence portion
uugagaacacauauuaccau

SEQ ID NO: 18427 - RNA, 20 nt, Artificial Sequence
  SAMD9L targeting guide sequence portion
uugagaaguaaagggaacaa

SEQ ID NO: 18428 - RNA, 20 nt, Artificial Sequence
  SAMD9L targeting guide sequence portion
uugagacuguucuggcuguu

SEQ ID NO: 18429 - RNA, 20 nt, Artificial Sequence
  SAMD9L targeting guide sequence portion
uugagauugccuuauuucca

SEQ ID NO: 18430 - RNA, 20 nt, Artificial Sequence
  SAMD9L targeting guide sequence portion
uugccuauaaagugaaacau

SEQ ID NO: 18431 - RNA, 20 nt, Artificial Sequence
  SAMD9L targeting guide sequence portion
uugccuuauuuccaucuaac

SEQ ID NO: 18432 - RNA, 20 nt, Artificial Sequence
  SAMD9L targeting guide sequence portion
uugucauucacaacugauuu

SEQ ID NO: 18433 - RNA, 20 nt, Artificial Sequence
  SAMD9L targeting guide sequence portion
uugucuccugugaauacagc

SEQ ID NO: 18434 - RNA, 20 nt, Artificial Sequence
  SAMD9L targeting guide sequence portion
uugugaaugacaaaucagaa

SEQ ID NO: 18435 - RNA, 20 nt, Artificial Sequence
  SAMD9L targeting guide sequence portion
uugugcaucugagaaugagc

SEQ ID NO: 18436 - RNA, 20 nt, Artificial Sequence
  SAMD9L targeting guide sequence portion
uuguucccauuuacagguga

SEQ ID NO: 18437 - RNA, 20 nt, Artificial Sequence
  SAMD9L targeting guide sequence portion
uuguucccuuuacuucucaa

SEQ ID NO: 18438 - RNA, 20 nt, Artificial Sequence
  SAMD9L targeting guide sequence portion
uuuaagaacuacgcauugcc

SEQ ID NO: 18439 - RNA, 20 nt, Artificial Sequence
  SAMD9L targeting guide sequence portion
uuuaagccauuuuugucucc

SEQ ID NO: 18440 - RNA, 20 nt, Artificial Sequence
  SAMD9L targeting guide sequence portion
uuuaaucuauauuagccuau

SEQ ID NO: 18441 - RNA, 20 nt, Artificial Sequence
  SAMD9L targeting guide sequence portion
uuuacaggugaaucucuucc

SEQ ID NO: 18442 - RNA, 20 nt, Artificial Sequence
  SAMD9L targeting guide sequence portion
uuuacuucucaaccugugcu

SEQ ID NO: 18443 - RNA, 20 nt, Artificial Sequence
  SAMD9L targeting guide sequence portion
uuuauaggcaaugcguaguu

SEQ ID NO: 18444 - RNA, 20 nt, Artificial Sequence
  SAMD9L targeting guide sequence portion
uuuauucaauauucaauuua

SEQ ID NO: 18445 - RNA, 20 nt, Artificial Sequence
  SAMD9L targeting guide sequence portion
uuucaagagucaccuucacc

SEQ ID NO: 18446 - RNA, 20 nt, Artificial Sequence
  SAMD9L targeting guide sequence portion
uuucacuuuauaggcaaugc

SEQ ID NO: 18447 - RNA, 20 nt, Artificial Sequence
  SAMD9L targeting guide sequence portion
uuucagugucaaggaaugcc

SEQ ID NO: 18448 - RNA, 20 nt, Artificial Sequence
  SAMD9L targeting guide sequence portion
uuuccaucuaacauucucuc

SEQ ID NO: 18449 - RNA, 20 nt, Artificial Sequence
  SAMD9L targeting guide sequence portion
uuuccauucauuacccucuu

SEQ ID NO: 18450 - RNA, 20 nt, Artificial Sequence
  SAMD9L targeting guide sequence portion
uuucuuagaucccaucuccc

SEQ ID NO: 18451 - RNA, 20 nt, Artificial Sequence
  SAMD9L targeting guide sequence portion
uuugucauucacaacugauu

SEQ ID NO: 18452 - RNA, 20 nt, Artificial Sequence
  SAMD9L targeting guide sequence portion
uuugucuccugugaauacag

SEQ ID NO: 18453 - RNA, 20 nt, Artificial Sequence
  SAMD9L targeting guide sequence portion
uuuguucccuuuacuucuca

SEQ ID NO: 18454 - RNA, 20 nt, Artificial Sequence
  SAMD9L targeting guide sequence portion
uuuuauucaauauucaauuu

SEQ ID NO: 18455 - RNA, 20 nt, Artificial Sequence
  SAMD9L targeting guide sequence portion
uuuucagugucaaggaaugc

SEQ ID NO: 18456 - RNA, 20 nt, Artificial Sequence
  SAMD9L targeting guide sequence portion
uuuuccauucauuacccucu

SEQ ID NO: 18457 - RNA, 20 nt, Artificial Sequence
  SAMD9L targeting guide sequence portion
uuuugucuccugugaauaca

SEQ ID NO: 18458 - RNA, 20 nt, Artificial Sequence
  SAMD9L targeting guide sequence portion
uuuuuauucaauauucaauu

SEQ ID NO: 18459 - RNA, 20 nt, Artificial Sequence
  SAMD9L targeting guide sequence portion
uuuuuccauucauuacccuc

SEQ ID NO: 18460 - RNA, 20 nt, Artificial Sequence
  SAMD9L targeting guide sequence portion
uuuuugucuccugugaauac

SEQ ID NO: 18461 - RNA, 20 nt, Artificial Sequence
  SAMD9L targeting guide sequence portion
uuuuuuauucaauauucaau

SEQ ID NO: 18462 - RNA, 20 nt, Artificial Sequence
  SAMD9L targeting guide sequence portion
uuuuuuccauucauuacccu

SEQ ID NO: 18463 - RNA, 21 nt, Artificial Sequence
  SAMD9L targeting guide sequence portion
aaaaaauaagccaggggagau

SEQ ID NO: 18464 - RNA, 21 nt, Artificial Sequence
  SAMD9L targeting guide sequence portion
aaaaauaagccaggggagaug

SEQ ID NO: 18465 - RNA, 21 nt, Artificial Sequence
  SAMD9L targeting guide sequence portion
aaaaauggcuuaaaggaagag

SEQ ID NO: 18466 - RNA, 21 nt, Artificial Sequence
  SAMD9L targeting guide sequence portion
aaaacuugagaacacauauua

SEQ ID NO: 18467 - RNA, 21 nt, Artificial Sequence
  SAMD9L targeting guide sequence portion
aaaauaagccaggggagaugg

SEQ ID NO: 18468 - RNA, 21 nt, Artificial Sequence
  SAMD9L targeting guide sequence portion
aaaauggcuuaaaggaagaga

SEQ ID NO: 18469 - RNA, 21 nt, Artificial Sequence
  SAMD9L targeting guide sequence portion
aaacagguggagauaaggcug

SEQ ID NO: 18470 - RNA, 21 nt, Artificial Sequence
  SAMD9L targeting guide sequence portion
aaacauaggcuaauauagauu

SEQ ID NO: 18471 - RNA, 21 nt, Artificial Sequence
  SAMD9L targeting guide sequence portion
aaacuugagaacacauauuac

SEQ ID NO: 18472 - RNA, 21 nt, Artificial Sequence
  SAMD9L targeting guide sequence portion
aaagaggguaaugaauggaaa

SEQ ID NO: 18473 - RNA, 21 nt, Artificial Sequence
  SAMD9L targeting guide sequence portion
aaaggaagagauucaccugua

SEQ ID NO: 18474 - RNA, 21 nt, Artificial Sequence
  SAMD9L targeting guide sequence portion
aaagggaacaaagaggguaau

SEQ ID NO: 18475 - RNA, 21 nt, Artificial Sequence
  SAMD9L targeting guide sequence portion
aaagugaaacauaggcuaaua

SEQ ID NO: 18476 - RNA, 21 nt, Artificial Sequence
  SAMD9L targeting guide sequence portion
aaauaagccaggggagauggg

SEQ ID NO: 18477 - RNA, 21 nt, Artificial Sequence
  SAMD9L targeting guide sequence portion
aaauaaggcaaucucaacaga

SEQ ID NO: 18478 - RNA, 21 nt, Artificial Sequence
  SAMD9L targeting guide sequence portion
aaaucagaauagcaggagaga

SEQ ID NO: 18479 - RNA, 21 nt, Artificial Sequence
  SAMD9L targeting guide sequence portion
aaaucaguugugaaugacaaa

SEQ ID NO: 18480 - RNA, 21 nt, Artificial Sequence
  SAMD9L targeting guide sequence portion
aaauggcuuaaaggaagagau

SEQ ID NO: 18481 - RNA, 21 nt, Artificial Sequence
  SAMD9L targeting guide sequence portion
aacaaagaggguaaugaaugg

SEQ ID NO: 18482 - RNA, 21 nt, Artificial Sequence
  SAMD9L targeting guide sequence portion
aacacauauuaccaugaggaa

SEQ ID NO: 18483 - RNA, 21 nt, Artificial Sequence
  SAMD9L targeting guide sequence portion
aacagagagaacagcauguau

SEQ ID NO: 18484 - RNA, 21 nt, Artificial Sequence
  SAMD9L targeting guide sequence portion
aacagcauguauauagcacag

SEQ ID NO: 18485 - RNA, 21 nt, Artificial Sequence
  SAMD9L targeting guide sequence portion
aacagccagaacagucucaag

SEQ ID NO: 18486 - RNA, 21 nt, Artificial Sequence
  SAMD9L targeting guide sequence portion
aacagguggagauaaggcugu

SEQ ID NO: 18487 - RNA, 21 nt, Artificial Sequence
  SAMD9L targeting guide sequence portion
aacauaggcuaauauagauua

SEQ ID NO: 18488 - RNA, 21 nt, Artificial Sequence
  SAMD9L targeting guide sequence portion
aacauucucucuccugcuauu

SEQ ID NO: 18489 - RNA, 21 nt, Artificial Sequence
  SAMD9L targeting guide sequence portion
aaccugugcuauauacaugcu

SEQ ID NO: 18490 - RNA, 21 nt, Artificial Sequence
  SAMD9L targeting guide sequence portion
aacuacgcauugccuauaaag

SEQ ID NO: 18491 - RNA, 21 nt, Artificial Sequence
  SAMD9L targeting guide sequence portion
aacugauuucaagagucaccu

SEQ ID NO: 18492 - RNA, 21 nt, Artificial Sequence
  SAMD9L targeting guide sequence portion
aacuugagaacacauauuacc

SEQ ID NO: 18493 - RNA, 21 nt, Artificial Sequence
  SAMD9L targeting guide sequence portion
aagaaacagguggagauaagg

SEQ ID NO: 18494 - RNA, 21 nt, Artificial Sequence
  SAMD9L targeting guide sequence portion
aagaacuacgcauugccuaua

SEQ ID NO: 18495 - RNA, 21 nt, Artificial Sequence
  SAMD9L targeting guide sequence portion
aagacuuccuggugaagguga

SEQ ID NO: 18496 - RNA, 21 nt, Artificial Sequence
  SAMD9L targeting guide sequence portion
aagagauucaccuguaaaugg

SEQ ID NO: 18497 - RNA, 21 nt, Artificial Sequence
  SAMD9L targeting guide sequence portion
aagaggguaaugaauggaaaa

SEQ ID NO: 18498 - RNA, 21 nt, Artificial Sequence
  SAMD9L targeting guide sequence portion
aagagucaccuucaccaggaa

SEQ ID NO: 18499 - RNA, 21 nt, Artificial Sequence
  SAMD9L targeting guide sequence portion
aagccaggggagaugggaucu

SEQ ID NO: 18500 - RNA, 21 nt, Artificial Sequence
  SAMD9L targeting guide sequence portion
aagccauuuuugucuccugug

SEQ ID NO: 18501 - RNA, 21 nt, Artificial Sequence
  SAMD9L targeting guide sequence portion
aagcccucuaaucaggcagga

SEQ ID NO: 18502 - RNA, 21 nt, Artificial Sequence
  SAMD9L targeting guide sequence portion
aagcucauucucagaugcaca

SEQ ID NO: 18503 - RNA, 21 nt, Artificial Sequence
  SAMD9L targeting guide sequence portion
aaggaagacuuccuggugaag

SEQ ID NO: 18504 - RNA, 21 nt, Artificial Sequence
  SAMD9L targeting guide sequence portion
aaggaagagauucaccuguaa

SEQ ID NO: 18505 - RNA, 21 nt, Artificial Sequence
  SAMD9L targeting guide sequence portion
aaggaaugccaucccagaagc

SEQ ID NO: 18506 - RNA, 21 nt, Artificial Sequence
  SAMD9L targeting guide sequence portion
aaggcaaucucaacagagaga

SEQ ID NO: 18507 - RNA, 21 nt, Artificial Sequence
  SAMD9L targeting guide sequence portion
aaggcuguauucacaggagac

SEQ ID NO: 18508 - RNA, 21 nt, Artificial Sequence
  SAMD9L targeting guide sequence portion
aagggaacaaagaggguaaug

SEQ ID NO: 18509 - RNA, 21 nt, Artificial Sequence
  SAMD9L targeting guide sequence portion
aaggugacucuugaaaucagu

SEQ ID NO: 18510 - RNA, 21 nt, Artificial Sequence
  SAMD9L targeting guide sequence portion
aaguaaagggaacaaagaggg

SEQ ID NO: 18511 - RNA, 21 nt, Artificial Sequence
  SAMD9L targeting guide sequence portion
aagucuuccuugaccaccauc

SEQ ID NO: 18512 - RNA, 21 nt, Artificial Sequence
  SAMD9L targeting guide sequence portion
aagugaaacauaggcuaauau

SEQ ID NO: 18513 - RNA, 21 nt, Artificial Sequence
  SAMD9L targeting guide sequence portion
aaguuuucagugucaaggaau

SEQ ID NO: 18514 - RNA, 21 nt, Artificial Sequence
  SAMD9L targeting guide sequence portion
aauaagccaggggagauggga

SEQ ID NO: 18515 - RNA, 21 nt, Artificial Sequence
  SAMD9L targeting guide sequence portion
aauaaggcaaucucaacagag

SEQ ID NO: 18516 - RNA, 21 nt, Artificial Sequence
  SAMD9L targeting guide sequence portion
aauacagccuuaucuccaccu

SEQ ID NO: 18517 - RNA, 21 nt, Artificial Sequence
  SAMD9L targeting guide sequence portion
aauagcaggagagagaauguu

SEQ ID NO: 18518 - RNA, 21 nt, Artificial Sequence
  SAMD9L targeting guide sequence portion
aauauagauuaaauugaauau

SEQ ID NO: 18519 - RNA, 21 nt, Artificial Sequence
  SAMD9L targeting guide sequence portion
aauauguguucucaaguuuuc

SEQ ID NO: 18520 - RNA, 21 nt, Artificial Sequence
  SAMD9L targeting guide sequence portion
aauauucaauuuaaucuauau

SEQ ID NO: 18521 - RNA, 21 nt, Artificial Sequence
  SAMD9L targeting guide sequence portion
aaucagaauagcaggagagag

SEQ ID NO: 18522 - RNA, 21 nt, Artificial Sequence
  SAMD9L targeting guide sequence portion
aaucaggcaggaaugauggug

SEQ ID NO: 18523 - RNA, 21 nt, Artificial Sequence
  SAMD9L targeting guide sequence portion
aaucaguugugaaugacaaau

SEQ ID NO: 18524 - RNA, 21 nt, Artificial Sequence
  SAMD9L targeting guide sequence portion
aaucuauauuagccuauguuu

SEQ ID NO: 18525 - RNA, 21 nt, Artificial Sequence
  SAMD9L targeting guide sequence portion
aaucucaacagagagaacagc

SEQ ID NO: 18526 - RNA, 21 nt, Artificial Sequence
  SAMD9L targeting guide sequence portion
aaucucuuccuuuaagccauu

SEQ ID NO: 18527 - RNA, 21 nt, Artificial Sequence
  SAMD9L targeting guide sequence portion
aaugaauggaaaaaauaagcc

SEQ ID NO: 18528 - RNA, 21 nt, Artificial Sequence
  SAMD9L targeting guide sequence portion
aaugacaaaucagaauagcag

SEQ ID NO: 18529 - RNA, 21 nt, Artificial Sequence
  SAMD9L targeting guide sequence portion
aaugagcuucugggauggcau

SEQ ID NO: 18530 - RNA, 21 nt, Artificial Sequence
  SAMD9L targeting guide sequence portion
aaugaugguggucaaggaaga

SEQ ID NO: 18531 - RNA, 21 nt, Artificial Sequence
  SAMD9L targeting guide sequence portion
aaugccaucccagaagcucau

SEQ ID NO: 18532 - RNA, 21 nt, Artificial Sequence
  SAMD9L targeting guide sequence portion
aaugcugcuugagacuguucu

SEQ ID NO: 18533 - RNA, 21 nt, Artificial Sequence
  SAMD9L targeting guide sequence portion
aauggaaaaaauaagccaggg

SEQ ID NO: 18534 - RNA, 21 nt, Artificial Sequence
  SAMD9L targeting guide sequence portion
aauggcuuaaaggaagagauu

SEQ ID NO: 18535 - RNA, 21 nt, Artificial Sequence
  SAMD9L targeting guide sequence portion
aauguuagauggaaauaaggc

SEQ ID NO: 18536 - RNA, 21 nt, Artificial Sequence
  SAMD9L targeting guide sequence portion
aauuuaagaacuacgcauugc

SEQ ID NO: 18537 - RNA, 21 nt, Artificial Sequence
  SAMD9L targeting guide sequence portion
aauuuaaucuauauuagccua

SEQ ID NO: 18538 - RNA, 21 nt, Artificial Sequence
  SAMD9L targeting guide sequence portion
acaaaaauggcuuaaaggaag

SEQ ID NO: 18539 - RNA, 21 nt, Artificial Sequence
  SAMD9L targeting guide sequence portion
acaaagaggguaaugaaugga

SEQ ID NO: 18540 - RNA, 21 nt, Artificial Sequence
  SAMD9L targeting guide sequence portion
acaaaucagaauagcaggaga

SEQ ID NO: 18541 - RNA, 21 nt, Artificial Sequence
  SAMD9L targeting guide sequence portion
acaacagccagaacagucuca

SEQ ID NO: 18542 - RNA, 21 nt, Artificial Sequence
  SAMD9L targeting guide sequence portion
acaacugauuucaagagucac

SEQ ID NO: 18543 - RNA, 21 nt, Artificial Sequence
  SAMD9L targeting guide sequence portion
acacauauuaccaugaggaag

SEQ ID NO: 18544 - RNA, 21 nt, Artificial Sequence
  SAMD9L targeting guide sequence portion
acacugaaaacuugagaacac

SEQ ID NO: 18545 - RNA, 21 nt, Artificial Sequence
  SAMD9L targeting guide sequence portion
acagagagaacagcauguaua

SEQ ID NO: 18546 - RNA, 21 nt, Artificial Sequence
  SAMD9L targeting guide sequence portion
acagcauguauauagcacagg

SEQ ID NO: 18547 - RNA, 21 nt, Artificial Sequence
  SAMD9L targeting guide sequence portion
acagccagaacagucucaagc

SEQ ID NO: 18548 - RNA, 21 nt, Artificial Sequence
  SAMD9L targeting guide sequence portion
acagccuuaucuccaccuguu

SEQ ID NO: 18549 - RNA, 21 nt, Artificial Sequence
  SAMD9L targeting guide sequence portion
acaggagacaaaaauggcuua

SEQ ID NO: 18550 - RNA, 21 nt, Artificial Sequence
  SAMD9L targeting guide sequence portion
acaggugaaucucuuccuuua

SEQ ID NO: 18551 - RNA, 21 nt, Artificial Sequence
  SAMD9L targeting guide sequence portion
acagguggagauaaggcugua

SEQ ID NO: 18552 - RNA, 21 nt, Artificial Sequence
  SAMD9L targeting guide sequence portion
acagguugagaaguaaaggga

SEQ ID NO: 18553 - RNA, 21 nt, Artificial Sequence
  SAMD9L targeting guide sequence portion
acauaggcuaauauagauuaa

SEQ ID NO: 18554 - RNA, 21 nt, Artificial Sequence
  SAMD9L targeting guide sequence portion
acauauuaccaugaggaagcc

SEQ ID NO: 18555 - RNA, 21 nt, Artificial Sequence
  SAMD9L targeting guide sequence portion
acaugcuguucucucuguuga

SEQ ID NO: 18556 - RNA, 21 nt, Artificial Sequence
  SAMD9L targeting guide sequence portion
acauucucucuccugcuauuc

SEQ ID NO: 18557 - RNA, 21 nt, Artificial Sequence
  SAMD9L targeting guide sequence portion
accaccaucauuccugccuga

SEQ ID NO: 18558 - RNA, 21 nt, Artificial Sequence
  SAMD9L targeting guide sequence portion
accaggaagucuuccuugacc

SEQ ID NO: 18559 - RNA, 21 nt, Artificial Sequence
  SAMD9L targeting guide sequence portion
accaucauuccugccugauua

SEQ ID NO: 18560 - RNA, 21 nt, Artificial Sequence
  SAMD9L targeting guide sequence portion
accaugaggaagcccucuaau

SEQ ID NO: 18561 - RNA, 21 nt, Artificial Sequence
  SAMD9L targeting guide sequence portion
acccucuuuguucccuuuacu

SEQ ID NO: 18562 - RNA, 21 nt, Artificial Sequence
  SAMD9L targeting guide sequence portion
accugugcuauauacaugcug

SEQ ID NO: 18563 - RNA, 21 nt, Artificial Sequence
  SAMD9L targeting guide sequence portion
accuguuucuuagaucccauc

SEQ ID NO: 18564 - RNA, 21 nt, Artificial Sequence
  SAMD9L targeting guide sequence portion
accuucaccaggaagucuucc

SEQ ID NO: 18565 - RNA, 21 nt, Artificial Sequence
  SAMD9L targeting guide sequence portion
acgcauugccuauaaagugaa

SEQ ID NO: 18566 - RNA, 21 nt, Artificial Sequence
  SAMD9L targeting guide sequence portion
acuacgcauugccuauaaagu

SEQ ID NO: 18567 - RNA, 21 nt, Artificial Sequence
  SAMD9L targeting guide sequence portion
acucuugaaaucaguugugaa

SEQ ID NO: 18568 - RNA, 21 nt, Artificial Sequence
  SAMD9L targeting guide sequence portion
acugaaaacuugagaacacau

SEQ ID NO: 18569 - RNA, 21 nt, Artificial Sequence
  SAMD9L targeting guide sequence portion
acugauuucaagagucaccuu

SEQ ID NO: 18570 - RNA, 21 nt, Artificial Sequence
  SAMD9L targeting guide sequence portion
acuguucuggcuguugugcau

SEQ ID NO: 18571 - RNA, 21 nt, Artificial Sequence
  SAMD9L targeting guide sequence portion
acuuccuggugaaggugacuc

SEQ ID NO: 18572 - RNA, 21 nt, Artificial Sequence
  SAMD9L targeting guide sequence portion
acuucucaaccugugcuauau

SEQ ID NO: 18573 - RNA, 21 nt, Artificial Sequence
  SAMD9L targeting guide sequence portion
acuugagaacacauauuacca

SEQ ID NO: 18574 - RNA, 21 nt, Artificial Sequence
  SAMD9L targeting guide sequence portion
acuuuauaggcaaugcguagu

SEQ ID NO: 18575 - RNA, 21 nt, Artificial Sequence
  SAMD9L targeting guide sequence portion
agaaacagguggagauaaggc

SEQ ID NO: 18576 - RNA, 21 nt, Artificial Sequence
  SAMD9L targeting guide sequence portion
agaacacauauuaccaugagg

SEQ ID NO: 18577 - RNA, 21 nt, Artificial Sequence
  SAMD9L targeting guide sequence portion
agaacagcauguauauagcac

SEQ ID NO: 18578 - RNA, 21 nt, Artificial Sequence
  SAMD9L targeting guide sequence portion
agaacagucucaagcagcauu

SEQ ID NO: 18579 - RNA, 21 nt, Artificial Sequence
  SAMD9L targeting guide sequence portion
agaacuacgcauugccuauaa

SEQ ID NO: 18580 - RNA, 21 nt, Artificial Sequence
  SAMD9L targeting guide sequence portion
agaagcucauucucagaugca

SEQ ID NO: 18581 - RNA, 21 nt, Artificial Sequence
  SAMD9L targeting guide sequence portion
agaaguaaagggaacaaagag

SEQ ID NO: 18582 - RNA, 21 nt, Artificial Sequence
  SAMD9L targeting guide sequence portion
agaauagcaggagagagaaug

SEQ ID NO: 18583 - RNA, 21 nt, Artificial Sequence
  SAMD9L targeting guide sequence portion
agaaugagcuucugggauggc

SEQ ID NO: 18584 - RNA, 21 nt, Artificial Sequence
  SAMD9L targeting guide sequence portion
agaaugcugcuugagacuguu

SEQ ID NO: 18585 - RNA, 21 nt, Artificial Sequence
  SAMD9L targeting guide sequence portion
agaauguuagauggaaauaag

SEQ ID NO: 18586 - RNA, 21 nt, Artificial Sequence
  SAMD9L targeting guide sequence portion
agacaaaaauggcuuaaagga

SEQ ID NO: 18587 - RNA, 21 nt, Artificial Sequence
  SAMD9L targeting guide sequence portion
agacuguucuggcuguugugc

SEQ ID NO: 18588 - RNA, 21 nt, Artificial Sequence
  SAMD9L targeting guide sequence portion
agacuuccuggugaaggugac

SEQ ID NO: 18589 - RNA, 21 nt, Artificial Sequence
  SAMD9L targeting guide sequence portion
agagaacagcauguauauagc

SEQ ID NO: 18590 - RNA, 21 nt, Artificial Sequence
  SAMD9L targeting guide sequence portion
agagaauguuagauggaaaua

SEQ ID NO: 18591 - RNA, 21 nt, Artificial Sequence
  SAMD9L targeting guide sequence portion
agagagaacagcauguauaua

SEQ ID NO: 18592 - RNA, 21 nt, Artificial Sequence
  SAMD9L targeting guide sequence portion
agagagaauguuagauggaaa

SEQ ID NO: 18593 - RNA, 21 nt, Artificial Sequence
  SAMD9L targeting guide sequence portion
agagauucaccuguaaauggg

SEQ ID NO: 18594 - RNA, 21 nt, Artificial Sequence
  SAMD9L targeting guide sequence portion
agagggcuuccucaugguaau

SEQ ID NO: 18595 - RNA, 21 nt, Artificial Sequence
  SAMD9L targeting guide sequence portion
agaggguaaugaauggaaaaa

SEQ ID NO: 18596 - RNA, 21 nt, Artificial Sequence
  SAMD9L targeting guide sequence portion
agagucaccuucaccaggaag

SEQ ID NO: 18597 - RNA, 21 nt, Artificial Sequence
  SAMD9L targeting guide sequence portion
agauaaggcuguauucacagg

SEQ ID NO: 18598 - RNA, 21 nt, Artificial Sequence
  SAMD9L targeting guide sequence portion
agaucccaucuccccuggcuu

SEQ ID NO: 18599 - RNA, 21 nt, Artificial Sequence
  SAMD9L targeting guide sequence portion
agaugcacaacagccagaaca

SEQ ID NO: 18600 - RNA, 21 nt, Artificial Sequence
  SAMD9L targeting guide sequence portion
agauggaaauaaggcaaucuc

SEQ ID NO: 18601 - RNA, 21 nt, Artificial Sequence
  SAMD9L targeting guide sequence portion
agaugggaucuaagaaacagg

SEQ ID NO: 18602 - RNA, 21 nt, Artificial Sequence
  SAMD9L targeting guide sequence portion
agauuaaauugaauauugaau

SEQ ID NO: 18603 - RNA, 21 nt, Artificial Sequence
  SAMD9L targeting guide sequence portion
agauucaccuguaaaugggaa

SEQ ID NO: 18604 - RNA, 21 nt, Artificial Sequence
  SAMD9L targeting guide sequence portion
agauugccuuauuuccaucua

SEQ ID NO: 18605 - RNA, 21 nt, Artificial Sequence
  SAMD9L targeting guide sequence portion
agcacagguugagaaguaaag

SEQ ID NO: 18606 - RNA, 21 nt, Artificial Sequence
  SAMD9L targeting guide sequence portion
agcaggagagagaauguuaga

SEQ ID NO: 18607 - RNA, 21 nt, Artificial Sequence
  SAMD9L targeting guide sequence portion
agcauguauauagcacagguu

SEQ ID NO: 18608 - RNA, 21 nt, Artificial Sequence
  SAMD9L targeting guide sequence portion
agccagaacagucucaagcag

SEQ ID NO: 18609 - RNA, 21 nt, Artificial Sequence
  SAMD9L targeting guide sequence portion
agccaggggagaugggaucua

SEQ ID NO: 18610 - RNA, 21 nt, Artificial Sequence
  SAMD9L targeting guide sequence portion
agccauuuuugucuccuguga

SEQ ID NO: 18611 - RNA, 21 nt, Artificial Sequence
  SAMD9L targeting guide sequence portion
agcccucuaaucaggcaggaa

SEQ ID NO: 18612 - RNA, 21 nt, Artificial Sequence
  SAMD9L targeting guide sequence portion
agccuauguuucacuuuauag

SEQ ID NO: 18613 - RNA, 21 nt, Artificial Sequence
  SAMD9L targeting guide sequence portion
agccuuaucuccaccuguuuc

SEQ ID NO: 18614 - RNA, 21 nt, Artificial Sequence
  SAMD9L targeting guide sequence portion
agcucauucucagaugcacaa

SEQ ID NO: 18615 - RNA, 21 nt, Artificial Sequence
  SAMD9L targeting guide sequence portion
agcuucugggauggcauuccu

SEQ ID NO: 18616 - RNA, 21 nt, Artificial Sequence
  SAMD9L targeting guide sequence portion
aggaagacuuccuggugaagg

SEQ ID NO: 18617 - RNA, 21 nt, Artificial Sequence
  SAMD9L targeting guide sequence portion
aggaagagauucaccuguaaa

SEQ ID NO: 18618 - RNA, 21 nt, Artificial Sequence
  SAMD9L targeting guide sequence portion
aggaagcccucuaaucaggca

SEQ ID NO: 18619 - RNA, 21 nt, Artificial Sequence
  SAMD9L targeting guide sequence portion
aggaagucuuccuugaccacc

SEQ ID NO: 18620 - RNA, 21 nt, Artificial Sequence
  SAMD9L targeting guide sequence portion
aggaaugaugguggucaagga

SEQ ID NO: 18621 - RNA, 21 nt, Artificial Sequence
  SAMD9L targeting guide sequence portion
aggaaugccaucccagaagcu

SEQ ID NO: 18622 - RNA, 21 nt, Artificial Sequence
  SAMD9L targeting guide sequence portion
aggagacaaaaauggcuuaaa

SEQ ID NO: 18623 - RNA, 21 nt, Artificial Sequence
  SAMD9L targeting guide sequence portion
aggagagagaauguuagaugg

SEQ ID NO: 18624 - RNA, 21 nt, Artificial Sequence
  SAMD9L targeting guide sequence portion
aggcaaucucaacagagagaa

SEQ ID NO: 18625 - RNA, 21 nt, Artificial Sequence
  SAMD9L targeting guide sequence portion
aggcaggaaugauggugguca

SEQ ID NO: 18626 - RNA, 21 nt, Artificial Sequence
  SAMD9L targeting guide sequence portion
aggcuaauauagauuaaauug

SEQ ID NO: 18627 - RNA, 21 nt, Artificial Sequence
  SAMD9L targeting guide sequence portion
aggcuguauucacaggagaca

SEQ ID NO: 18628 - RNA, 21 nt, Artificial Sequence
  SAMD9L targeting guide sequence portion
agggaacaaagaggguaauga

SEQ ID NO: 18629 - RNA, 21 nt, Artificial Sequence
  SAMD9L targeting guide sequence portion
agggcuuccucaugguaauau

SEQ ID NO: 18630 - RNA, 21 nt, Artificial Sequence
  SAMD9L targeting guide sequence portion
aggggagaugggaucuaagaa

SEQ ID NO: 18631 - RNA, 21 nt, Artificial Sequence
  SAMD9L targeting guide sequence portion
aggguaaugaauggaaaaaau

SEQ ID NO: 18632 - RNA, 21 nt, Artificial Sequence
  SAMD9L targeting guide sequence portion
aggugaaucucuuccuuuaag

SEQ ID NO: 18633 - RNA, 21 nt, Artificial Sequence
  SAMD9L targeting guide sequence portion
aggugacucuugaaaucaguu

SEQ ID NO: 18634 - RNA, 21 nt, Artificial Sequence
  SAMD9L targeting guide sequence portion
agguggagauaaggcuguauu

SEQ ID NO: 18635 - RNA, 21 nt, Artificial Sequence
  SAMD9L targeting guide sequence portion
agguugagaaguaaagggaac

SEQ ID NO: 18636 - RNA, 21 nt, Artificial Sequence
  SAMD9L targeting guide sequence portion
aguaaagggaacaaagagggu

SEQ ID NO: 18637 - RNA, 21 nt, Artificial Sequence
  SAMD9L targeting guide sequence portion
agucaccuucaccaggaaguc

SEQ ID NO: 18638 - RNA, 21 nt, Artificial Sequence
  SAMD9L targeting guide sequence portion
agucuuccuugaccaccauca

SEQ ID NO: 18639 - RNA, 21 nt, Artificial Sequence
  SAMD9L targeting guide sequence portion
agugaaacauaggcuaauaua

SEQ ID NO: 18640 - RNA, 21 nt, Artificial Sequence
  SAMD9L targeting guide sequence portion
agugucaaggaaugccauccc

SEQ ID NO: 18641 - RNA, 21 nt, Artificial Sequence
  SAMD9L targeting guide sequence portion
aguugugaaugacaaaucaga

SEQ ID NO: 18642 - RNA, 21 nt, Artificial Sequence
  SAMD9L targeting guide sequence portion
aguuuucagugucaaggaaug

SEQ ID NO: 18643 - RNA, 21 nt, Artificial Sequence
  SAMD9L targeting guide sequence portion
auaaagugaaacauaggcuaa

SEQ ID NO: 18644 - RNA, 21 nt, Artificial Sequence
  SAMD9L targeting guide sequence portion
auaagccaggggagaugggau

SEQ ID NO: 18645 - RNA, 21 nt, Artificial Sequence
  SAMD9L targeting guide sequence portion
auaaggcaaucucaacagaga

SEQ ID NO: 18646 - RNA, 21 nt, Artificial Sequence
  SAMD9L targeting guide sequence portion
auaaggcuguauucacaggag

SEQ ID NO: 18647 - RNA, 21 nt, Artificial Sequence
  SAMD9L targeting guide sequence portion
auacagccuuaucuccaccug

SEQ ID NO: 18648 - RNA, 21 nt, Artificial Sequence
  SAMD9L targeting guide sequence portion
auacaugcuguucucucuguu

SEQ ID NO: 18649 - RNA, 21 nt, Artificial Sequence
  SAMD9L targeting guide sequence portion
auagauuaaauugaauauuga

SEQ ID NO: 18650 - RNA, 21 nt, Artificial Sequence
  SAMD9L targeting guide sequence portion
auagcacagguugagaaguaa

SEQ ID NO: 18651 - RNA, 21 nt, Artificial Sequence
  SAMD9L targeting guide sequence portion
auagcaggagagagaauguua

SEQ ID NO: 18652 - RNA, 21 nt, Artificial Sequence
  SAMD9L targeting guide sequence portion
auaggcaaugcguaguucuua

SEQ ID NO: 18653 - RNA, 21 nt, Artificial Sequence
  SAMD9L targeting guide sequence portion
auaggcuaauauagauuaaau

SEQ ID NO: 18654 - RNA, 21 nt, Artificial Sequence
  SAMD9L targeting guide sequence portion
auauacaugcuguucucucug

SEQ ID NO: 18655 - RNA, 21 nt, Artificial Sequence
  SAMD9L targeting guide sequence portion
auauagauuaaauugaauauu

SEQ ID NO: 18656 - RNA, 21 nt, Artificial Sequence
  SAMD9L targeting guide sequence portion
auauagcacagguugagaagu

SEQ ID NO: 18657 - RNA, 21 nt, Artificial Sequence
  SAMD9L targeting guide sequence portion
auauguguucucaaguuuuca

SEQ ID NO: 18658 - RNA, 21 nt, Artificial Sequence
  SAMD9L targeting guide sequence portion
auauuaccaugaggaagcccu

SEQ ID NO: 18659 - RNA, 21 nt, Artificial Sequence
  SAMD9L targeting guide sequence portion
auauuagccuauguuucacuu

SEQ ID NO: 18660 - RNA, 21 nt, Artificial Sequence
  SAMD9L targeting guide sequence portion
auauucaauuuaaucuauauu

SEQ ID NO: 18661 - RNA, 21 nt, Artificial Sequence
  SAMD9L targeting guide sequence portion
auauuuuuuauucaauauuca

SEQ ID NO: 18662 - RNA, 21 nt, Artificial Sequence
  SAMD9L targeting guide sequence portion
aucagaauagcaggagagaga

SEQ ID NO: 18663 - RNA, 21 nt, Artificial Sequence
  SAMD9L targeting guide sequence portion
aucaggcaggaaugauggugg

SEQ ID NO: 18664 - RNA, 21 nt, Artificial Sequence
  SAMD9L targeting guide sequence portion
aucaguugugaaugacaaauc

SEQ ID NO: 18665 - RNA, 21 nt, Artificial Sequence
  SAMD9L targeting guide sequence portion
aucauuccugccugauuagag

SEQ ID NO: 18666 - RNA, 21 nt, Artificial Sequence
  SAMD9L targeting guide sequence portion
aucccagaagcucauucucag

SEQ ID NO: 18667 - RNA, 21 nt, Artificial Sequence
  SAMD9L targeting guide sequence portion
aucccaucuccccuggcuuau

SEQ ID NO: 18668 - RNA, 21 nt, Artificial Sequence
  SAMD9L targeting guide sequence portion
aucuaacauucucucuccugc

SEQ ID NO: 18669 - RNA, 21 nt, Artificial Sequence
  SAMD9L targeting guide sequence portion
aucuaagaaacagguggagau

SEQ ID NO: 18670 - RNA, 21 nt, Artificial Sequence
  SAMD9L targeting guide sequence portion
aucuauauuagccuauguuuc

SEQ ID NO: 18671 - RNA, 21 nt, Artificial Sequence
  SAMD9L targeting guide sequence portion
aucucaacagagagaacagca

SEQ ID NO: 18672 - RNA, 21 nt, Artificial Sequence
  SAMD9L targeting guide sequence portion
aucuccaccuguuucuuagau

SEQ ID NO: 18673 - RNA, 21 nt, Artificial Sequence
  SAMD9L targeting guide sequence portion
aucuccccuggcuuauuuuuu

SEQ ID NO: 18674 - RNA, 21 nt, Artificial Sequence
  SAMD9L targeting guide sequence portion
aucucuuccuuuaagccauuu

SEQ ID NO: 18675 - RNA, 21 nt, Artificial Sequence
  SAMD9L targeting guide sequence portion
aucugagaaugagcuucuggg

SEQ ID NO: 18676 - RNA, 21 nt, Artificial Sequence
  SAMD9L targeting guide sequence portion
augaauggaaaaaauaagcca

SEQ ID NO: 18677 - RNA, 21 nt, Artificial Sequence
  SAMD9L targeting guide sequence portion
augacaaaucagaauagcagg

SEQ ID NO: 18678 - RNA, 21 nt, Artificial Sequence
  SAMD9L targeting guide sequence portion
augagcuucugggauggcauu

SEQ ID NO: 18679 - RNA, 21 nt, Artificial Sequence
  SAMD9L targeting guide sequence portion
augaggaagcccucuaaucag

SEQ ID NO: 18680 - RNA, 21 nt, Artificial Sequence
  SAMD9L targeting guide sequence portion
augaugguggucaaggaagac

SEQ ID NO: 18681 - RNA, 21 nt, Artificial Sequence
  SAMD9L targeting guide sequence portion
augcacaacagccagaacagu

SEQ ID NO: 18682 - RNA, 21 nt, Artificial Sequence
  SAMD9L targeting guide sequence portion
augccaucccagaagcucauu

SEQ ID NO: 18683 - RNA, 21 nt, Artificial Sequence
  SAMD9L targeting guide sequence portion
augcugcuugagacuguucug

SEQ ID NO: 18684 - RNA, 21 nt, Artificial Sequence
  SAMD9L targeting guide sequence portion
augcuguucucucuguugaga

SEQ ID NO: 18685 - RNA, 21 nt, Artificial Sequence
  SAMD9L targeting guide sequence portion
auggaaaaaauaagccagggg

SEQ ID NO: 18686 - RNA, 21 nt, Artificial Sequence
  SAMD9L targeting guide sequence portion
auggaaauaaggcaaucucaa

SEQ ID NO: 18687 - RNA, 21 nt, Artificial Sequence
  SAMD9L targeting guide sequence portion
auggcauuccuugacacugaa

SEQ ID NO: 18688 - RNA, 21 nt, Artificial Sequence
  SAMD9L targeting guide sequence portion
auggcuuaaaggaagagauuc

SEQ ID NO: 18689 - RNA, 21 nt, Artificial Sequence
  SAMD9L targeting guide sequence portion
augggaucuaagaaacaggug

SEQ ID NO: 18690 - RNA, 21 nt, Artificial Sequence
  SAMD9L targeting guide sequence portion
augguaauauguguucucaag

SEQ ID NO: 18691 - RNA, 21 nt, Artificial Sequence
  SAMD9L targeting guide sequence portion
augguggucaaggaagacuuc

SEQ ID NO: 18692 - RNA, 21 nt, Artificial Sequence
  SAMD9L targeting guide sequence portion
auguauauagcacagguugag

SEQ ID NO: 18693 - RNA, 21 nt, Artificial Sequence
  SAMD9L targeting guide sequence portion
auguguucucaaguuuucagu

SEQ ID NO: 18694 - RNA, 21 nt, Artificial Sequence
  SAMD9L targeting guide sequence portion
auguuagauggaaauaaggca

SEQ ID NO: 18695 - RNA, 21 nt, Artificial Sequence
  SAMD9L targeting guide sequence portion
auguuucacuuuauaggcaau

SEQ ID NO: 18696 - RNA, 21 nt, Artificial Sequence
  SAMD9L targeting guide sequence portion
auuaaauugaauauugaauaa

SEQ ID NO: 18697 - RNA, 21 nt, Artificial Sequence
  SAMD9L targeting guide sequence portion
auuaccaugaggaagcccucu

SEQ ID NO: 18698 - RNA, 21 nt, Artificial Sequence
  SAMD9L targeting guide sequence portion
auuacccucuuuguucccuuu

SEQ ID NO: 18699 - RNA, 21 nt, Artificial Sequence
  SAMD9L targeting guide sequence portion
auuagagggcuuccucauggu

SEQ ID NO: 18700 - RNA, 21 nt, Artificial Sequence
  SAMD9L targeting guide sequence portion
auuagccuauguuucacuuua

SEQ ID NO: 18701 - RNA, 21 nt, Artificial Sequence
  SAMD9L targeting guide sequence portion
auucaauauucaauuuaaucu

SEQ ID NO: 18702 - RNA, 21 nt, Artificial Sequence
  SAMD9L targeting guide sequence portion
auucaauuuaaucuauauuag

SEQ ID NO: 18703 - RNA, 21 nt, Artificial Sequence
  SAMD9L targeting guide sequence portion
auucacaacugauuucaagag

SEQ ID NO: 18704 - RNA, 21 nt, Artificial Sequence
  SAMD9L targeting guide sequence portion
auucacaggagacaaaaaugg

SEQ ID NO: 18705 - RNA, 21 nt, Artificial Sequence
  SAMD9L targeting guide sequence portion
auucauuacccucuuuguucc

SEQ ID NO: 18706 - RNA, 21 nt, Artificial Sequence
  SAMD9L targeting guide sequence portion
auuccugccugauuagagggc

SEQ ID NO: 18707 - RNA, 21 nt, Artificial Sequence
  SAMD9L targeting guide sequence portion
auuccuugacacugaaaacuu

SEQ ID NO: 18708 - RNA, 21 nt, Artificial Sequence
  SAMD9L targeting guide sequence portion
auucucagaugcacaacagcc

SEQ ID NO: 18709 - RNA, 21 nt, Artificial Sequence
  SAMD9L targeting guide sequence portion
auucucucuccugcuauucug

SEQ ID NO: 18710 - RNA, 21 nt, Artificial Sequence
  SAMD9L targeting guide sequence portion
auucugauuugucauucacaa

SEQ ID NO: 18711 - RNA, 21 nt, Artificial Sequence
  SAMD9L targeting guide sequence portion
auugccuauaaagugaaacau

SEQ ID NO: 18712 - RNA, 21 nt, Artificial Sequence
  SAMD9L targeting guide sequence portion
auugccuuauuuccaucuaac

SEQ ID NO: 18713 - RNA, 21 nt, Artificial Sequence
  SAMD9L targeting guide sequence portion
auuuaagaacuacgcauugcc

SEQ ID NO: 18714 - RNA, 21 nt, Artificial Sequence
  SAMD9L targeting guide sequence portion
auuuaaucuauauuagccuau

SEQ ID NO: 18715 - RNA, 21 nt, Artificial Sequence
  SAMD9L targeting guide sequence portion
auuuacaggugaaucucuucc

SEQ ID NO: 18716 - RNA, 21 nt, Artificial Sequence
  SAMD9L targeting guide sequence portion
auuucaagagucaccuucacc

SEQ ID NO: 18717 - RNA, 21 nt, Artificial Sequence
  SAMD9L targeting guide sequence portion
auuuccaucuaacauucucuc

SEQ ID NO: 18718 - RNA, 21 nt, Artificial Sequence
  SAMD9L targeting guide sequence portion
auuugucauucacaacugauu

SEQ ID NO: 18719 - RNA, 21 nt, Artificial Sequence
  SAMD9L targeting guide sequence portion
auuuuugucuccugugaauac

SEQ ID NO: 18720 - RNA, 21 nt, Artificial Sequence
  SAMD9L targeting guide sequence portion
auuuuuuauucaauauucaau

SEQ ID NO: 18721 - RNA, 21 nt, Artificial Sequence
  SAMD9L targeting guide sequence portion
auuuuuuccauucauuacccu

SEQ ID NO: 18722 - RNA, 21 nt, Artificial Sequence
  SAMD9L targeting guide sequence portion
caaaaauggcuuaaaggaaga

SEQ ID NO: 18723 - RNA, 21 nt, Artificial Sequence
  SAMD9L targeting guide sequence portion
caaagaggguaaugaauggaa

SEQ ID NO: 18724 - RNA, 21 nt, Artificial Sequence
  SAMD9L targeting guide sequence portion
caaaucagaauagcaggagag

SEQ ID NO: 18725 - RNA, 21 nt, Artificial Sequence
  SAMD9L targeting guide sequence portion
caacagagagaacagcaugua

SEQ ID NO: 18726 - RNA, 21 nt, Artificial Sequence
  SAMD9L targeting guide sequence portion
caacagccagaacagucucaa

SEQ ID NO: 18727 - RNA, 21 nt, Artificial Sequence
  SAMD9L targeting guide sequence portion
caaccugugcuauauacaugc

SEQ ID NO: 18728 - RNA, 21 nt, Artificial Sequence
  SAMD9L targeting guide sequence portion
caacugauuucaagagucacc

SEQ ID NO: 18729 - RNA, 21 nt, Artificial Sequence
  SAMD9L targeting guide sequence portion
caagagucaccuucaccagga

SEQ ID NO: 18730 - RNA, 21 nt, Artificial Sequence
  SAMD9L targeting guide sequence portion
caaggaagacuuccuggugaa

SEQ ID NO: 18731 - RNA, 21 nt, Artificial Sequence
  SAMD9L targeting guide sequence portion
caaggaaugccaucccagaag

SEQ ID NO: 18732 - RNA, 21 nt, Artificial Sequence
  SAMD9L targeting guide sequence portion
caaguuuucagugucaaggaa

SEQ ID NO: 18733 - RNA, 21 nt, Artificial Sequence
  SAMD9L targeting guide sequence portion
caauauucaauuuaaucuaua

SEQ ID NO: 18734 - RNA, 21 nt, Artificial Sequence
  SAMD9L targeting guide sequence portion
caaucucaacagagagaacag

SEQ ID NO: 18735 - RNA, 21 nt, Artificial Sequence
  SAMD9L targeting guide sequence portion
caauuuaaucuauauuagccu

SEQ ID NO: 18736 - RNA, 21 nt, Artificial Sequence
  SAMD9L targeting guide sequence portion
cacaacagccagaacagucuc

SEQ ID NO: 18737 - RNA, 21 nt, Artificial Sequence
  SAMD9L targeting guide sequence portion
cacaacugauuucaagaguca

SEQ ID NO: 18738 - RNA, 21 nt, Artificial Sequence
  SAMD9L targeting guide sequence portion
cacaggagacaaaaauggcuu

SEQ ID NO: 18739 - RNA, 21 nt, Artificial Sequence
  SAMD9L targeting guide sequence portion
cacagguugagaaguaaaggg

SEQ ID NO: 18740 - RNA, 21 nt, Artificial Sequence
  SAMD9L targeting guide sequence portion
cacauauuaccaugaggaagc

SEQ ID NO: 18741 - RNA, 21 nt, Artificial Sequence
  SAMD9L targeting guide sequence portion
caccaggaagucuuccuugac

SEQ ID NO: 18742 - RNA, 21 nt, Artificial Sequence
  SAMD9L targeting guide sequence portion
caccaucauuccugccugauu

SEQ ID NO: 18743 - RNA, 21 nt, Artificial Sequence
  SAMD9L targeting guide sequence portion
caccuguuucuuagaucccau

SEQ ID NO: 18744 - RNA, 21 nt, Artificial Sequence
  SAMD9L targeting guide sequence portion
caccuucaccaggaagucuuc

SEQ ID NO: 18745 - RNA, 21 nt, Artificial Sequence
  SAMD9L targeting guide sequence portion
cacugaaaacuugagaacaca

SEQ ID NO: 18746 - RNA, 21 nt, Artificial Sequence
  SAMD9L targeting guide sequence portion
cacuuuauaggcaaugcguag

SEQ ID NO: 18747 - RNA, 21 nt, Artificial Sequence
  SAMD9L targeting guide sequence portion
cagaacagucucaagcagcau

SEQ ID NO: 18748 - RNA, 21 nt, Artificial Sequence
  SAMD9L targeting guide sequence portion
cagaagcucauucucagaugc

SEQ ID NO: 18749 - RNA, 21 nt, Artificial Sequence
  SAMD9L targeting guide sequence portion
cagaauagcaggagagagaau

SEQ ID NO: 18750 - RNA, 21 nt, Artificial Sequence
  SAMD9L targeting guide sequence portion
cagagagaacagcauguauau

SEQ ID NO: 18751 - RNA, 21 nt, Artificial Sequence
  SAMD9L targeting guide sequence portion
cagaugcacaacagccagaac

SEQ ID NO: 18752 - RNA, 21 nt, Artificial Sequence
  SAMD9L targeting guide sequence portion
cagcauguauauagcacaggu

SEQ ID NO: 18753 - RNA, 21 nt, Artificial Sequence
  SAMD9L targeting guide sequence portion
cagccagaacagucucaagca

SEQ ID NO: 18754 - RNA, 21 nt, Artificial Sequence
  SAMD9L targeting guide sequence portion
cagccuuaucuccaccuguuu

SEQ ID NO: 18755 - RNA, 21 nt, Artificial Sequence
  SAMD9L targeting guide sequence portion
caggaagucuuccuugaccac

SEQ ID NO: 18756 - RNA, 21 nt, Artificial Sequence
  SAMD9L targeting guide sequence portion
caggaaugaugguggucaagg

SEQ ID NO: 18757 - RNA, 21 nt, Artificial Sequence
  SAMD9L targeting guide sequence portion
caggagacaaaaauggcuuaa

SEQ ID NO: 18758 - RNA, 21 nt, Artificial Sequence
  SAMD9L targeting guide sequence portion
caggagagagaauguuagaug

SEQ ID NO: 18759 - RNA, 21 nt, Artificial Sequence
  SAMD9L targeting guide sequence portion
caggcaggaaugauggugguc

SEQ ID NO: 18760 - RNA, 21 nt, Artificial Sequence
  SAMD9L targeting guide sequence portion
caggggagaugggaucuaaga

SEQ ID NO: 18761 - RNA, 21 nt, Artificial Sequence
  SAMD9L targeting guide sequence portion
caggugaaucucuuccuuuaa

SEQ ID NO: 18762 - RNA, 21 nt, Artificial Sequence
  SAMD9L targeting guide sequence portion
cagguggagauaaggcuguau

SEQ ID NO: 18763 - RNA, 21 nt, Artificial Sequence
  SAMD9L targeting guide sequence portion
cagguugagaaguaaagggaa

SEQ ID NO: 18764 - RNA, 21 nt, Artificial Sequence
  SAMD9L targeting guide sequence portion
cagugucaaggaaugccaucc

SEQ ID NO: 18765 - RNA, 21 nt, Artificial Sequence
  SAMD9L targeting guide sequence portion
caguugugaaugacaaaucag

SEQ ID NO: 18766 - RNA, 21 nt, Artificial Sequence
  SAMD9L targeting guide sequence portion
cauaggcuaauauagauuaaa

SEQ ID NO: 18767 - RNA, 21 nt, Artificial Sequence
  SAMD9L targeting guide sequence portion
cauauuaccaugaggaagccc

SEQ ID NO: 18768 - RNA, 21 nt, Artificial Sequence
  SAMD9L targeting guide sequence portion
caucauuccugccugauuaga

SEQ ID NO: 18769 - RNA, 21 nt, Artificial Sequence
  SAMD9L targeting guide sequence portion
caucccagaagcucauucuca

SEQ ID NO: 18770 - RNA, 21 nt, Artificial Sequence
  SAMD9L targeting guide sequence portion
caucuaacauucucucuccug

SEQ ID NO: 18771 - RNA, 21 nt, Artificial Sequence
  SAMD9L targeting guide sequence portion
caucuccccuggcuuauuuuu

SEQ ID NO: 18772 - RNA, 21 nt, Artificial Sequence
  SAMD9L targeting guide sequence portion
caucugagaaugagcuucugg

SEQ ID NO: 18773 - RNA, 21 nt, Artificial Sequence
  SAMD9L targeting guide sequence portion
caugaggaagcccucuaauca

SEQ ID NO: 18774 - RNA, 21 nt, Artificial Sequence
  SAMD9L targeting guide sequence portion
caugcuguucucucuguugag

SEQ ID NO: 18775 - RNA, 21 nt, Artificial Sequence
  SAMD9L targeting guide sequence portion
caugguaauauguguucucaa

SEQ ID NO: 18776 - RNA, 21 nt, Artificial Sequence
  SAMD9L targeting guide sequence portion
cauguauauagcacagguuga

SEQ ID NO: 18777 - RNA, 21 nt, Artificial Sequence
  SAMD9L targeting guide sequence portion
cauuacccucuuuguucccuu

SEQ ID NO: 18778 - RNA, 21 nt, Artificial Sequence
  SAMD9L targeting guide sequence portion
cauucacaacugauuucaaga

SEQ ID NO: 18779 - RNA, 21 nt, Artificial Sequence
  SAMD9L targeting guide sequence portion
cauucauuacccucuuuguuc

SEQ ID NO: 18780 - RNA, 21 nt, Artificial Sequence
  SAMD9L targeting guide sequence portion
cauuccugccugauuagaggg

SEQ ID NO: 18781 - RNA, 21 nt, Artificial Sequence
  SAMD9L targeting guide sequence portion
cauuccuugacacugaaaacu

SEQ ID NO: 18782 - RNA, 21 nt, Artificial Sequence
  SAMD9L targeting guide sequence portion
cauucucagaugcacaacagc

SEQ ID NO: 18783 - RNA, 21 nt, Artificial Sequence
  SAMD9L targeting guide sequence portion
cauucucucuccugcuauucu

SEQ ID NO: 18784 - RNA, 21 nt, Artificial Sequence
  SAMD9L targeting guide sequence portion
cauugccuauaaagugaaaca

SEQ ID NO: 18785 - RNA, 21 nt, Artificial Sequence
  SAMD9L targeting guide sequence portion
cauuuacaggugaaucucuuc

SEQ ID NO: 18786 - RNA, 21 nt, Artificial Sequence
  SAMD9L targeting guide sequence portion
cauuuuugucuccugugaaua

SEQ ID NO: 18787 - RNA, 21 nt, Artificial Sequence
  SAMD9L targeting guide sequence portion
ccaccaucauuccugccugau

SEQ ID NO: 18788 - RNA, 21 nt, Artificial Sequence
  SAMD9L targeting guide sequence portion
ccaccuguuucuuagauccca

SEQ ID NO: 18789 - RNA, 21 nt, Artificial Sequence
  SAMD9L targeting guide sequence portion
ccagaacagucucaagcagca

SEQ ID NO: 18790 - RNA, 21 nt, Artificial Sequence
  SAMD9L targeting guide sequence portion
ccagaagcucauucucagaug

SEQ ID NO: 18791 - RNA, 21 nt, Artificial Sequence
  SAMD9L targeting guide sequence portion
ccaggaagucuuccuugacca

SEQ ID NO: 18792 - RNA, 21 nt, Artificial Sequence
  SAMD9L targeting guide sequence portion
ccaggggagaugggaucuaag

SEQ ID NO: 18793 - RNA, 21 nt, Artificial Sequence
  SAMD9L targeting guide sequence portion
ccaucauuccugccugauuag

SEQ ID NO: 18794 - RNA, 21 nt, Artificial Sequence
  SAMD9L targeting guide sequence portion
ccaucccagaagcucauucuc

SEQ ID NO: 18795 - RNA, 21 nt, Artificial Sequence
  SAMD9L targeting guide sequence portion
ccaucuaacauucucucuccu

SEQ ID NO: 18796 - RNA, 21 nt, Artificial Sequence
  SAMD9L targeting guide sequence portion
ccaucuccccuggcuuauuuu

SEQ ID NO: 18797 - RNA, 21 nt, Artificial Sequence
  SAMD9L targeting guide sequence portion
ccaugaggaagcccucuaauc

SEQ ID NO: 18798 - RNA, 21 nt, Artificial Sequence
  SAMD9L targeting guide sequence portion
ccauucauuacccucuuuguu

SEQ ID NO: 18799 - RNA, 21 nt, Artificial Sequence
  SAMD9L targeting guide sequence portion
ccauuuacaggugaaucucuu

SEQ ID NO: 18800 - RNA, 21 nt, Artificial Sequence
  SAMD9L targeting guide sequence portion
ccauuuuugucuccugugaau

SEQ ID NO: 18801 - RNA, 21 nt, Artificial Sequence
  SAMD9L targeting guide sequence portion
cccagaagcucauucucagau

SEQ ID NO: 18802 - RNA, 21 nt, Artificial Sequence
  SAMD9L targeting guide sequence portion
cccaucuccccuggcuuauuu

SEQ ID NO: 18803 - RNA, 21 nt, Artificial Sequence
  SAMD9L targeting guide sequence portion
cccauuuacaggugaaucucu

SEQ ID NO: 18804 - RNA, 21 nt, Artificial Sequence
  SAMD9L targeting guide sequence portion
ccccuggcuuauuuuuuccau

SEQ ID NO: 18805 - RNA, 21 nt, Artificial Sequence
  SAMD9L targeting guide sequence portion
cccucuaaucaggcaggaaug

SEQ ID NO: 18806 - RNA, 21 nt, Artificial Sequence
  SAMD9L targeting guide sequence portion
cccucuuuguucccuuuacuu

SEQ ID NO: 18807 - RNA, 21 nt, Artificial Sequence
  SAMD9L targeting guide sequence portion
cccuggcuuauuuuuuccauu

SEQ ID NO: 18808 - RNA, 21 nt, Artificial Sequence
  SAMD9L targeting guide sequence portion
cccuuuacuucucaaccugug

SEQ ID NO: 18809 - RNA, 21 nt, Artificial Sequence
  SAMD9L targeting guide sequence portion
ccuauaaagugaaacauaggc

SEQ ID NO: 18810 - RNA, 21 nt, Artificial Sequence
  SAMD9L targeting guide sequence portion
ccuauguuucacuuuauaggc

SEQ ID NO: 18811 - RNA, 21 nt, Artificial Sequence
  SAMD9L targeting guide sequence portion
ccucaugguaauauguguucu

SEQ ID NO: 18812 - RNA, 21 nt, Artificial Sequence
  SAMD9L targeting guide sequence portion
ccucuaaucaggcaggaauga

SEQ ID NO: 18813 - RNA, 21 nt, Artificial Sequence
  SAMD9L targeting guide sequence portion
ccucuuuguucccuuuacuuc

SEQ ID NO: 18814 - RNA, 21 nt, Artificial Sequence
  SAMD9L targeting guide sequence portion
ccugauuagagggcuuccuca

SEQ ID NO: 18815 - RNA, 21 nt, Artificial Sequence
  SAMD9L targeting guide sequence portion
ccugccugauuagagggcuuc

SEQ ID NO: 18816 - RNA, 21 nt, Artificial Sequence
  SAMD9L targeting guide sequence portion
ccugcuauucugauuugucau

SEQ ID NO: 18817 - RNA, 21 nt, Artificial Sequence
  SAMD9L targeting guide sequence portion
ccuggcuuauuuuuuccauuc

SEQ ID NO: 18818 - RNA, 21 nt, Artificial Sequence
  SAMD9L targeting guide sequence portion
ccuggugaaggugacucuuga

SEQ ID NO: 18819 - RNA, 21 nt, Artificial Sequence
  SAMD9L targeting guide sequence portion
ccugugaauacagccuuaucu

SEQ ID NO: 18820 - RNA, 21 nt, Artificial Sequence
  SAMD9L targeting guide sequence portion
ccugugcuauauacaugcugu

SEQ ID NO: 18821 - RNA, 21 nt, Artificial Sequence
  SAMD9L targeting guide sequence portion
ccuguuucuuagaucccaucu

SEQ ID NO: 18822 - RNA, 21 nt, Artificial Sequence
  SAMD9L targeting guide sequence portion
ccuuaucuccaccuguuucuu

SEQ ID NO: 18823 - RNA, 21 nt, Artificial Sequence
  SAMD9L targeting guide sequence portion
ccuuauuuccaucuaacauuc

SEQ ID NO: 18824 - RNA, 21 nt, Artificial Sequence
  SAMD9L targeting guide sequence portion
ccuucaccaggaagucuuccu

SEQ ID NO: 18825 - RNA, 21 nt, Artificial Sequence
  SAMD9L targeting guide sequence portion
ccuugacacugaaaacuugag

SEQ ID NO: 18826 - RNA, 21 nt, Artificial Sequence
  SAMD9L targeting guide sequence portion
ccuugaccaccaucauuccug

SEQ ID NO: 18827 - RNA, 21 nt, Artificial Sequence
  SAMD9L targeting guide sequence portion
ccuuuaagccauuuuugucuc

SEQ ID NO: 18828 - RNA, 21 nt, Artificial Sequence
  SAMD9L targeting guide sequence portion
ccuuuacuucucaaccugugc

SEQ ID NO: 18829 - RNA, 21 nt, Artificial Sequence
  SAMD9L targeting guide sequence portion
cgcauugccuauaaagugaaa

SEQ ID NO: 18830 - RNA, 21 nt, Artificial Sequence
  SAMD9L targeting guide sequence portion
cuaacauucucucuccugcua

SEQ ID NO: 18831 - RNA, 21 nt, Artificial Sequence
  SAMD9L targeting guide sequence portion
cuaagaaacagguggagauaa

SEQ ID NO: 18832 - RNA, 21 nt, Artificial Sequence
  SAMD9L targeting guide sequence portion
cuaauauagauuaaauugaau

SEQ ID NO: 18833 - RNA, 21 nt, Artificial Sequence
  SAMD9L targeting guide sequence portion
cuaaucaggcaggaaugaugg

SEQ ID NO: 18834 - RNA, 21 nt, Artificial Sequence
  SAMD9L targeting guide sequence portion
cuacgcauugccuauaaagug

SEQ ID NO: 18835 - RNA, 21 nt, Artificial Sequence
  SAMD9L targeting guide sequence portion
cuagaaugcugcuugagacug

SEQ ID NO: 18836 - RNA, 21 nt, Artificial Sequence
  SAMD9L targeting guide sequence portion
cuauaaagugaaacauaggcu

SEQ ID NO: 18837 - RNA, 21 nt, Artificial Sequence
  SAMD9L targeting guide sequence portion
cuauauacaugcuguucucuc

SEQ ID NO: 18838 - RNA, 21 nt, Artificial Sequence
  SAMD9L targeting guide sequence portion
cuauauuagccuauguuucac

SEQ ID NO: 18839 - RNA, 21 nt, Artificial Sequence
  SAMD9L targeting guide sequence portion
cuauguuucacuuuauaggca

SEQ ID NO: 18840 - RNA, 21 nt, Artificial Sequence
  SAMD9L targeting guide sequence portion
cuauucugauuugucauucac

SEQ ID NO: 18841 - RNA, 21 nt, Artificial Sequence
  SAMD9L targeting guide sequence portion
cucaacagagagaacagcaug

SEQ ID NO: 18842 - RNA, 21 nt, Artificial Sequence
  SAMD9L targeting guide sequence portion
cucaaccugugcuauauacau

SEQ ID NO: 18843 - RNA, 21 nt, Artificial Sequence
  SAMD9L targeting guide sequence portion
cucaaguuuucagugucaagg

SEQ ID NO: 18844 - RNA, 21 nt, Artificial Sequence
  SAMD9L targeting guide sequence portion
cucagaugcacaacagccaga

SEQ ID NO: 18845 - RNA, 21 nt, Artificial Sequence
  SAMD9L targeting guide sequence portion
cucaugguaauauguguucuc

SEQ ID NO: 18846 - RNA, 21 nt, Artificial Sequence
  SAMD9L targeting guide sequence portion
cucauucucagaugcacaaca

SEQ ID NO: 18847 - RNA, 21 nt, Artificial Sequence
  SAMD9L targeting guide sequence portion
cuccaccuguuucuuagaucc

SEQ ID NO: 18848 - RNA, 21 nt, Artificial Sequence
  SAMD9L targeting guide sequence portion
cuccccuggcuuauuuuuucc

SEQ ID NO: 18849 - RNA, 21 nt, Artificial Sequence
  SAMD9L targeting guide sequence portion
cuccugcuauucugauuuguc

SEQ ID NO: 18850 - RNA, 21 nt, Artificial Sequence
  SAMD9L targeting guide sequence portion
cuccugugaauacagccuuau

SEQ ID NO: 18851 - RNA, 21 nt, Artificial Sequence
  SAMD9L targeting guide sequence portion
cucuaaucaggcaggaaugau

SEQ ID NO: 18852 - RNA, 21 nt, Artificial Sequence
  SAMD9L targeting guide sequence portion
cucuagaaugcugcuugagac

SEQ ID NO: 18853 - RNA, 21 nt, Artificial Sequence
  SAMD9L targeting guide sequence portion
cucuccugcuauucugauuug

SEQ ID NO: 18854 - RNA, 21 nt, Artificial Sequence
  SAMD9L targeting guide sequence portion
cucucuccugcuauucugauu

SEQ ID NO: 18855 - RNA, 21 nt, Artificial Sequence
  SAMD9L targeting guide sequence portion
cucucuguugagauugccuua

SEQ ID NO: 18856 - RNA, 21 nt, Artificial Sequence
  SAMD9L targeting guide sequence portion
cucuguugagauugccuuauu

SEQ ID NO: 18857 - RNA, 21 nt, Artificial Sequence
  SAMD9L targeting guide sequence portion
cucuuccuuuaagccauuuuu

SEQ ID NO: 18858 - RNA, 21 nt, Artificial Sequence
  SAMD9L targeting guide sequence portion
cucuugaaaucaguugugaau

SEQ ID NO: 18859 - RNA, 21 nt, Artificial Sequence
  SAMD9L targeting guide sequence portion
cucuuguucccauuuacaggu

SEQ ID NO: 18860 - RNA, 21 nt, Artificial Sequence
  SAMD9L targeting guide sequence portion
cucuuuguucccuuuacuucu

SEQ ID NO: 18861 - RNA, 21 nt, Artificial Sequence
  SAMD9L targeting guide sequence portion
cugaaaacuugagaacacaua

SEQ ID NO: 18862 - RNA, 21 nt, Artificial Sequence
  SAMD9L targeting guide sequence portion
cugagaaugagcuucugggau

SEQ ID NO: 18863 - RNA, 21 nt, Artificial Sequence
  SAMD9L targeting guide sequence portion
cugauuagagggcuuccucau

SEQ ID NO: 18864 - RNA, 21 nt, Artificial Sequence
  SAMD9L targeting guide sequence portion
cugauuucaagagucaccuuc

SEQ ID NO: 18865 - RNA, 21 nt, Artificial Sequence
  SAMD9L targeting guide sequence portion
cugauuugucauucacaacug

SEQ ID NO: 18866 - RNA, 21 nt, Artificial Sequence
  SAMD9L targeting guide sequence portion
cugccugauuagagggcuucc

SEQ ID NO: 18867 - RNA, 21 nt, Artificial Sequence
  SAMD9L targeting guide sequence portion
cugcuauucugauuugucauu

SEQ ID NO: 18868 - RNA, 21 nt, Artificial Sequence
  SAMD9L targeting guide sequence portion
cugcuugagacuguucuggcu

SEQ ID NO: 18869 - RNA, 21 nt, Artificial Sequence
  SAMD9L targeting guide sequence portion
cuggcuguugugcaucugaga

SEQ ID NO: 18870 - RNA, 21 nt, Artificial Sequence
  SAMD9L targeting guide sequence portion
cuggcuuauuuuuuccauuca

SEQ ID NO: 18871 - RNA, 21 nt, Artificial Sequence
  SAMD9L targeting guide sequence portion
cugggauggcauuccuugaca

SEQ ID NO: 18872 - RNA, 21 nt, Artificial Sequence
  SAMD9L targeting guide sequence portion
cuggugaaggugacucuugaa

SEQ ID NO: 18873 - RNA, 21 nt, Artificial Sequence
  SAMD9L targeting guide sequence portion
cuguauucacaggagacaaaa

SEQ ID NO: 18874 - RNA, 21 nt, Artificial Sequence
  SAMD9L targeting guide sequence portion
cugugaauacagccuuaucuc

SEQ ID NO: 18875 - RNA, 21 nt, Artificial Sequence
  SAMD9L targeting guide sequence portion
cugugcuauauacaugcuguu

SEQ ID NO: 18876 - RNA, 21 nt, Artificial Sequence
  SAMD9L targeting guide sequence portion
cuguucucucuguugagauug

SEQ ID NO: 18877 - RNA, 21 nt, Artificial Sequence
  SAMD9L targeting guide sequence portion
cuguucuggcuguugugcauc

SEQ ID NO: 18878 - RNA, 21 nt, Artificial Sequence
  SAMD9L targeting guide sequence portion
cuguugagauugccuuauuuc

SEQ ID NO: 18879 - RNA, 21 nt, Artificial Sequence
  SAMD9L targeting guide sequence portion
cuguugugcaucugagaauga

SEQ ID NO: 18880 - RNA, 21 nt, Artificial Sequence
  SAMD9L targeting guide sequence portion
cuguuucuuagaucccaucuc

SEQ ID NO: 18881 - RNA, 21 nt, Artificial Sequence
  SAMD9L targeting guide sequence portion
cuuaaaggaagagauucaccu

SEQ ID NO: 18882 - RNA, 21 nt, Artificial Sequence
  SAMD9L targeting guide sequence portion
cuuagaucccaucuccccugg

SEQ ID NO: 18883 - RNA, 21 nt, Artificial Sequence
  SAMD9L targeting guide sequence portion
cuuaucuccaccuguuucuua

SEQ ID NO: 18884 - RNA, 21 nt, Artificial Sequence
  SAMD9L targeting guide sequence portion
cuuauuuccaucuaacauucu

SEQ ID NO: 18885 - RNA, 21 nt, Artificial Sequence
  SAMD9L targeting guide sequence portion
cuuauuuuuuccauucauuac

SEQ ID NO: 18886 - RNA, 21 nt, Artificial Sequence
  SAMD9L targeting guide sequence portion
cuucaccaggaagucuuccuu

SEQ ID NO: 18887 - RNA, 21 nt, Artificial Sequence
  SAMD9L targeting guide sequence portion
cuuccucaugguaauaugugu

SEQ ID NO: 18888 - RNA, 21 nt, Artificial Sequence
  SAMD9L targeting guide sequence portion
cuuccuggugaaggugacucu

SEQ ID NO: 18889 - RNA, 21 nt, Artificial Sequence
  SAMD9L targeting guide sequence portion
cuuccuugaccaccaucauuc

SEQ ID NO: 18890 - RNA, 21 nt, Artificial Sequence
  SAMD9L targeting guide sequence portion
cuuccuuuaagccauuuuugu

SEQ ID NO: 18891 - RNA, 21 nt, Artificial Sequence
  SAMD9L targeting guide sequence portion
cuucucaaccugugcuauaua

SEQ ID NO: 18892 - RNA, 21 nt, Artificial Sequence
  SAMD9L targeting guide sequence portion
cuucugggauggcauuccuug

SEQ ID NO: 18893 - RNA, 21 nt, Artificial Sequence
  SAMD9L targeting guide sequence portion
cuugaaaucaguugugaauga

SEQ ID NO: 18894 - RNA, 21 nt, Artificial Sequence
  SAMD9L targeting guide sequence portion
cuugacacugaaaacuugaga

SEQ ID NO: 18895 - RNA, 21 nt, Artificial Sequence
  SAMD9L targeting guide sequence portion
cuugaccaccaucauuccugc

SEQ ID NO: 18896 - RNA, 21 nt, Artificial Sequence
  SAMD9L targeting guide sequence portion
cuugagaacacauauuaccau

SEQ ID NO: 18897 - RNA, 21 nt, Artificial Sequence
  SAMD9L targeting guide sequence portion
cuugagacuguucuggcuguu

SEQ ID NO: 18898 - RNA, 21 nt, Artificial Sequence
  SAMD9L targeting guide sequence portion
cuuguucccauuuacagguga

SEQ ID NO: 18899 - RNA, 21 nt, Artificial Sequence
  SAMD9L targeting guide sequence portion
cuuuaagccauuuuugucucc

SEQ ID NO: 18900 - RNA, 21 nt, Artificial Sequence
  SAMD9L targeting guide sequence portion
cuuuacuucucaaccugugcu

SEQ ID NO: 18901 - RNA, 21 nt, Artificial Sequence
  SAMD9L targeting guide sequence portion
cuuuauaggcaaugcguaguu

SEQ ID NO: 18902 - RNA, 21 nt, Artificial Sequence
  SAMD9L targeting guide sequence portion
cuuuguucccuuuacuucuca

SEQ ID NO: 18903 - RNA, 21 nt, Artificial Sequence
  SAMD9L targeting guide sequence portion
gaaaaaauaagccaggggaga

SEQ ID NO: 18904 - RNA, 21 nt, Artificial Sequence
  SAMD9L targeting guide sequence portion
gaaaacuugagaacacauauu

SEQ ID NO: 18905 - RNA, 21 nt, Artificial Sequence
  SAMD9L targeting guide sequence portion
gaaacagguggagauaaggcu

SEQ ID NO: 18906 - RNA, 21 nt, Artificial Sequence
  SAMD9L targeting guide sequence portion
gaaacauaggcuaauauagau

SEQ ID NO: 18907 - RNA, 21 nt, Artificial Sequence
  SAMD9L targeting guide sequence portion
gaaauaaggcaaucucaacag

SEQ ID NO: 18908 - RNA, 21 nt, Artificial Sequence
  SAMD9L targeting guide sequence portion
gaaaucaguugugaaugacaa

SEQ ID NO: 18909 - RNA, 21 nt, Artificial Sequence
  SAMD9L targeting guide sequence portion
gaacaaagaggguaaugaaug

SEQ ID NO: 18910 - RNA, 21 nt, Artificial Sequence
  SAMD9L targeting guide sequence portion
gaacacauauuaccaugagga

SEQ ID NO: 18911 - RNA, 21 nt, Artificial Sequence
  SAMD9L targeting guide sequence portion
gaacagcauguauauagcaca

SEQ ID NO: 18912 - RNA, 21 nt, Artificial Sequence
  SAMD9L targeting guide sequence portion
gaacagucucaagcagcauuc

SEQ ID NO: 18913 - RNA, 21 nt, Artificial Sequence
  SAMD9L targeting guide sequence portion
gaacuacgcauugccuauaaa

SEQ ID NO: 18914 - RNA, 21 nt, Artificial Sequence
  SAMD9L targeting guide sequence portion
gaagacuuccuggugaaggug

SEQ ID NO: 18915 - RNA, 21 nt, Artificial Sequence
  SAMD9L targeting guide sequence portion
gaagagauucaccuguaaaug

SEQ ID NO: 18916 - RNA, 21 nt, Artificial Sequence
  SAMD9L targeting guide sequence portion
gaagcccucuaaucaggcagg

SEQ ID NO: 18917 - RNA, 21 nt, Artificial Sequence
  SAMD9L targeting guide sequence portion
gaagcucauucucagaugcac

SEQ ID NO: 18918 - RNA, 21 nt, Artificial Sequence
  SAMD9L targeting guide sequence portion
gaaggugacucuugaaaucag

SEQ ID NO: 18919 - RNA, 21 nt, Artificial Sequence
  SAMD9L targeting guide sequence portion
gaaguaaagggaacaaagagg

SEQ ID NO: 18920 - RNA, 21 nt, Artificial Sequence
  SAMD9L targeting guide sequence portion
gaagucuuccuugaccaccau

SEQ ID NO: 18921 - RNA, 21 nt, Artificial Sequence
  SAMD9L targeting guide sequence portion
gaauacagccuuaucuccacc

SEQ ID NO: 18922 - RNA, 21 nt, Artificial Sequence
  SAMD9L targeting guide sequence portion
gaauagcaggagagagaaugu

SEQ ID NO: 18923 - RNA, 21 nt, Artificial Sequence
  SAMD9L targeting guide sequence portion
gaaucucuuccuuuaagccau

SEQ ID NO: 18924 - RNA, 21 nt, Artificial Sequence
  SAMD9L targeting guide sequence portion
gaaugacaaaucagaauagca

SEQ ID NO: 18925 - RNA, 21 nt, Artificial Sequence
  SAMD9L targeting guide sequence portion
gaaugagcuucugggauggca

SEQ ID NO: 18926 - RNA, 21 nt, Artificial Sequence
  SAMD9L targeting guide sequence portion
gaaugaugguggucaaggaag

SEQ ID NO: 18927 - RNA, 21 nt, Artificial Sequence
  SAMD9L targeting guide sequence portion
gaaugccaucccagaagcuca

SEQ ID NO: 18928 - RNA, 21 nt, Artificial Sequence
  SAMD9L targeting guide sequence portion
gaaugcugcuugagacuguuc

SEQ ID NO: 18929 - RNA, 21 nt, Artificial Sequence
  SAMD9L targeting guide sequence portion
gaauggaaaaaauaagccagg

SEQ ID NO: 18930 - RNA, 21 nt, Artificial Sequence
  SAMD9L targeting guide sequence portion
gaauguuagauggaaauaagg

SEQ ID NO: 18931 - RNA, 21 nt, Artificial Sequence
  SAMD9L targeting guide sequence portion
gaauuuaagaacuacgcauug

SEQ ID NO: 18932 - RNA, 21 nt, Artificial Sequence
  SAMD9L targeting guide sequence portion
gacaaaaauggcuuaaaggaa

SEQ ID NO: 18933 - RNA, 21 nt, Artificial Sequence
  SAMD9L targeting guide sequence portion
gacaaaucagaauagcaggag

SEQ ID NO: 18934 - RNA, 21 nt, Artificial Sequence
  SAMD9L targeting guide sequence portion
gacacugaaaacuugagaaca

SEQ ID NO: 18935 - RNA, 21 nt, Artificial Sequence
  SAMD9L targeting guide sequence portion
gaccaccaucauuccugccug

SEQ ID NO: 18936 - RNA, 21 nt, Artificial Sequence
  SAMD9L targeting guide sequence portion
gacucuugaaaucaguuguga

SEQ ID NO: 18937 - RNA, 21 nt, Artificial Sequence
  SAMD9L targeting guide sequence portion
gacuguucuggcuguugugca

SEQ ID NO: 18938 - RNA, 21 nt, Artificial Sequence
  SAMD9L targeting guide sequence portion
gacuuccuggugaaggugacu

SEQ ID NO: 18939 - RNA, 21 nt, Artificial Sequence
  SAMD9L targeting guide sequence portion
gagaacacauauuaccaugag

SEQ ID NO: 18940 - RNA, 21 nt, Artificial Sequence
  SAMD9L targeting guide sequence portion
gagaacagcauguauauagca

SEQ ID NO: 18941 - RNA, 21 nt, Artificial Sequence
  SAMD9L targeting guide sequence portion
gagaaguaaagggaacaaaga

SEQ ID NO: 18942 - RNA, 21 nt, Artificial Sequence
  SAMD9L targeting guide sequence portion
gagaaugagcuucugggaugg

SEQ ID NO: 18943 - RNA, 21 nt, Artificial Sequence
  SAMD9L targeting guide sequence portion
gagaauguuagauggaaauaa

SEQ ID NO: 18944 - RNA, 21 nt, Artificial Sequence
  SAMD9L targeting guide sequence portion
gagacaaaaauggcuuaaagg

SEQ ID NO: 18945 - RNA, 21 nt, Artificial Sequence
  SAMD9L targeting guide sequence portion
gagacuguucuggcuguugug

SEQ ID NO: 18946 - RNA, 21 nt, Artificial Sequence
  SAMD9L targeting guide sequence portion
gagagaacagcauguauauag

SEQ ID NO: 18947 - RNA, 21 nt, Artificial Sequence
  SAMD9L targeting guide sequence portion
gagagaauguuagauggaaau

SEQ ID NO: 18948 - RNA, 21 nt, Artificial Sequence
  SAMD9L targeting guide sequence portion
gagagagaauguuagauggaa

SEQ ID NO: 18949 - RNA, 21 nt, Artificial Sequence
  SAMD9L targeting guide sequence portion
gagauaaggcuguauucacag

SEQ ID NO: 18950 - RNA, 21 nt, Artificial Sequence
  SAMD9L targeting guide sequence portion
gagaugggaucuaagaaacag

SEQ ID NO: 18951 - RNA, 21 nt, Artificial Sequence
  SAMD9L targeting guide sequence portion
gagauucaccuguaaauggga

SEQ ID NO: 18952 - RNA, 21 nt, Artificial Sequence
  SAMD9L targeting guide sequence portion
gagauugccuuauuuccaucu

SEQ ID NO: 18953 - RNA, 21 nt, Artificial Sequence
  SAMD9L targeting guide sequence portion
gagcuucugggauggcauucc

SEQ ID NO: 18954 - RNA, 21 nt, Artificial Sequence
  SAMD9L targeting guide sequence portion
gaggaagcccucuaaucaggc

SEQ ID NO: 18955 - RNA, 21 nt, Artificial Sequence
  SAMD9L targeting guide sequence portion
gagggcuuccucaugguaaua

SEQ ID NO: 18956 - RNA, 21 nt, Artificial Sequence
  SAMD9L targeting guide sequence portion
gaggguaaugaauggaaaaaa

SEQ ID NO: 18957 - RNA, 21 nt, Artificial Sequence
  SAMD9L targeting guide sequence portion
gagucaccuucaccaggaagu

SEQ ID NO: 18958 - RNA, 21 nt, Artificial Sequence
  SAMD9L targeting guide sequence portion
gauaaggcuguauucacagga

SEQ ID NO: 18959 - RNA, 21 nt, Artificial Sequence
  SAMD9L targeting guide sequence portion
gaucccaucuccccuggcuua

SEQ ID NO: 18960 - RNA, 21 nt, Artificial Sequence
  SAMD9L targeting guide sequence portion
gaucuaagaaacagguggaga

SEQ ID NO: 18961 - RNA, 21 nt, Artificial Sequence
  SAMD9L targeting guide sequence portion
gaugcacaacagccagaacag

SEQ ID NO: 18962 - RNA, 21 nt, Artificial Sequence
  SAMD9L targeting guide sequence portion
gauggaaauaaggcaaucuca

SEQ ID NO: 18963 - RNA, 21 nt, Artificial Sequence
  SAMD9L targeting guide sequence portion
gauggcauuccuugacacuga

SEQ ID NO: 18964 - RNA, 21 nt, Artificial Sequence
  SAMD9L targeting guide sequence portion
gaugggaucuaagaaacaggu

SEQ ID NO: 18965 - RNA, 21 nt, Artificial Sequence
  SAMD9L targeting guide sequence portion
gaugguggucaaggaagacuu

SEQ ID NO: 18966 - RNA, 21 nt, Artificial Sequence
  SAMD9L targeting guide sequence portion
gauuaaauugaauauugaaua

SEQ ID NO: 18967 - RNA, 21 nt, Artificial Sequence
  SAMD9L targeting guide sequence portion
gauuagagggcuuccucaugg

SEQ ID NO: 18968 - RNA, 21 nt, Artificial Sequence
  SAMD9L targeting guide sequence portion
gauugccuuauuuccaucuaa

SEQ ID NO: 18969 - RNA, 21 nt, Artificial Sequence
  SAMD9L targeting guide sequence portion
gauuucaagagucaccuucac

SEQ ID NO: 18970 - RNA, 21 nt, Artificial Sequence
  SAMD9L targeting guide sequence portion
gauuugucauucacaacugau

SEQ ID NO: 18971 - RNA, 21 nt, Artificial Sequence
  SAMD9L targeting guide sequence portion
gcaaucucaacagagagaaca

SEQ ID NO: 18972 - RNA, 21 nt, Artificial Sequence
  SAMD9L targeting guide sequence portion
gcacaacagccagaacagucu

SEQ ID NO: 18973 - RNA, 21 nt, Artificial Sequence
  SAMD9L targeting guide sequence portion
gcacagguugagaaguaaagg

SEQ ID NO: 18974 - RNA, 21 nt, Artificial Sequence
  SAMD9L targeting guide sequence portion
gcaggaaugaugguggucaag

SEQ ID NO: 18975 - RNA, 21 nt, Artificial Sequence
  SAMD9L targeting guide sequence portion
gcaggagagagaauguuagau

SEQ ID NO: 18976 - RNA, 21 nt, Artificial Sequence
  SAMD9L targeting guide sequence portion
gcaucugagaaugagcuucug

SEQ ID NO: 18977 - RNA, 21 nt, Artificial Sequence
  SAMD9L targeting guide sequence portion
gcauguauauagcacagguug

SEQ ID NO: 18978 - RNA, 21 nt, Artificial Sequence
  SAMD9L targeting guide sequence portion
gcauuccuugacacugaaaac

SEQ ID NO: 18979 - RNA, 21 nt, Artificial Sequence
  SAMD9L targeting guide sequence portion
gcauugccuauaaagugaaac

SEQ ID NO: 18980 - RNA, 21 nt, Artificial Sequence
  SAMD9L targeting guide sequence portion
gccagaacagucucaagcagc

SEQ ID NO: 18981 - RNA, 21 nt, Artificial Sequence
  SAMD9L targeting guide sequence portion
gccaggggagaugggaucuaa

SEQ ID NO: 18982 - RNA, 21 nt, Artificial Sequence
  SAMD9L targeting guide sequence portion
gccaucccagaagcucauucu

SEQ ID NO: 18983 - RNA, 21 nt, Artificial Sequence
  SAMD9L targeting guide sequence portion
gccauuuuugucuccugugaa

SEQ ID NO: 18984 - RNA, 21 nt, Artificial Sequence
  SAMD9L targeting guide sequence portion
gcccucuaaucaggcaggaau

SEQ ID NO: 18985 - RNA, 21 nt, Artificial Sequence
  SAMD9L targeting guide sequence portion
gccuauaaagugaaacauagg

SEQ ID NO: 18986 - RNA, 21 nt, Artificial Sequence
  SAMD9L targeting guide sequence portion
gccuauguuucacuuuauagg

SEQ ID NO: 18987 - RNA, 21 nt, Artificial Sequence
  SAMD9L targeting guide sequence portion
gccugauuagagggcuuccuc

SEQ ID NO: 18988 - RNA, 21 nt, Artificial Sequence
  SAMD9L targeting guide sequence portion
gccuuaucuccaccuguuucu

SEQ ID NO: 18989 - RNA, 21 nt, Artificial Sequence
  SAMD9L targeting guide sequence portion
gccuuauuuccaucuaacauu

SEQ ID NO: 18990 - RNA, 21 nt, Artificial Sequence
  SAMD9L targeting guide sequence portion
gcuaauauagauuaaauugaa

SEQ ID NO: 18991 - RNA, 21 nt, Artificial Sequence
  SAMD9L targeting guide sequence portion
gcuauauacaugcuguucucu

SEQ ID NO: 18992 - RNA, 21 nt, Artificial Sequence
  SAMD9L targeting guide sequence portion
gcuauucugauuugucauuca

SEQ ID NO: 18993 - RNA, 21 nt, Artificial Sequence
  SAMD9L targeting guide sequence portion
gcucauucucagaugcacaac

SEQ ID NO: 18994 - RNA, 21 nt, Artificial Sequence
  SAMD9L targeting guide sequence portion
gcucuagaaugcugcuugaga

SEQ ID NO: 18995 - RNA, 21 nt, Artificial Sequence
  SAMD9L targeting guide sequence portion
gcugcuugagacuguucuggc

SEQ ID NO: 18996 - RNA, 21 nt, Artificial Sequence
  SAMD9L targeting guide sequence portion
gcuguauucacaggagacaaa

SEQ ID NO: 18997 - RNA, 21 nt, Artificial Sequence
  SAMD9L targeting guide sequence portion
gcuguucucucuguugagauu

SEQ ID NO: 18998 - RNA, 21 nt, Artificial Sequence
  SAMD9L targeting guide sequence portion
gcuguugugcaucugagaaug

SEQ ID NO: 18999 - RNA, 21 nt, Artificial Sequence
  SAMD9L targeting guide sequence portion
gcuuaaaggaagagauucacc

SEQ ID NO: 19000 - RNA, 21 nt, Artificial Sequence
  SAMD9L targeting guide sequence portion
gcuuauuuuuuccauucauua

SEQ ID NO: 19001 - RNA, 21 nt, Artificial Sequence
  SAMD9L targeting guide sequence portion
gcuuccucaugguaauaugug

SEQ ID NO: 19002 - RNA, 21 nt, Artificial Sequence
  SAMD9L targeting guide sequence portion
gcuucugggauggcauuccuu

SEQ ID NO: 19003 - RNA, 21 nt, Artificial Sequence
  SAMD9L targeting guide sequence portion
gcuugagacuguucuggcugu

SEQ ID NO: 19004 - RNA, 21 nt, Artificial Sequence
  SAMD9L targeting guide sequence portion
ggaaaaaauaagccaggggag

SEQ ID NO: 19005 - RNA, 21 nt, Artificial Sequence
  SAMD9L targeting guide sequence portion
ggaaauaaggcaaucucaaca

SEQ ID NO: 19006 - RNA, 21 nt, Artificial Sequence
  SAMD9L targeting guide sequence portion
ggaacaaagaggguaaugaau

SEQ ID NO: 19007 - RNA, 21 nt, Artificial Sequence
  SAMD9L targeting guide sequence portion
ggaagacuuccuggugaaggu

SEQ ID NO: 19008 - RNA, 21 nt, Artificial Sequence
  SAMD9L targeting guide sequence portion
ggaagagauucaccuguaaau

SEQ ID NO: 19009 - RNA, 21 nt, Artificial Sequence
  SAMD9L targeting guide sequence portion
ggaagcccucuaaucaggcag

SEQ ID NO: 19010 - RNA, 21 nt, Artificial Sequence
  SAMD9L targeting guide sequence portion
ggaagucuuccuugaccacca

SEQ ID NO: 19011 - RNA, 21 nt, Artificial Sequence
  SAMD9L targeting guide sequence portion
ggaaugaugguggucaaggaa

SEQ ID NO: 19012 - RNA, 21 nt, Artificial Sequence
  SAMD9L targeting guide sequence portion
ggaaugccaucccagaagcuc

SEQ ID NO: 19013 - RNA, 21 nt, Artificial Sequence
  SAMD9L targeting guide sequence portion
ggaauuuaagaacuacgcauu

SEQ ID NO: 19014 - RNA, 21 nt, Artificial Sequence
  SAMD9L targeting guide sequence portion
ggagacaaaaauggcuuaaag

SEQ ID NO: 19015 - RNA, 21 nt, Artificial Sequence
  SAMD9L targeting guide sequence portion
ggagagagaauguuagaugga

SEQ ID NO: 19016 - RNA, 21 nt, Artificial Sequence
  SAMD9L targeting guide sequence portion
ggagauaaggcuguauucaca

SEQ ID NO: 19017 - RNA, 21 nt, Artificial Sequence
  SAMD9L targeting guide sequence portion
ggagaugggaucuaagaaaca

SEQ ID NO: 19018 - RNA, 21 nt, Artificial Sequence
  SAMD9L targeting guide sequence portion
ggaucuaagaaacagguggag

SEQ ID NO: 19019 - RNA, 21 nt, Artificial Sequence
  SAMD9L targeting guide sequence portion
ggauggcauuccuugacacug

SEQ ID NO: 19020 - RNA, 21 nt, Artificial Sequence
  SAMD9L targeting guide sequence portion
ggcaaucucaacagagagaac

SEQ ID NO: 19021 - RNA, 21 nt, Artificial Sequence
  SAMD9L targeting guide sequence portion
ggcaggaaugaugguggucaa

SEQ ID NO: 19022 - RNA, 21 nt, Artificial Sequence
  SAMD9L targeting guide sequence portion
ggcauuccuugacacugaaaa

SEQ ID NO: 19023 - RNA, 21 nt, Artificial Sequence
  SAMD9L targeting guide sequence portion
ggcuaauauagauuaaauuga

SEQ ID NO: 19024 - RNA, 21 nt, Artificial Sequence
  SAMD9L targeting guide sequence portion
ggcuguauucacaggagacaa

SEQ ID NO: 19025 - RNA, 21 nt, Artificial Sequence
  SAMD9L targeting guide sequence portion
ggcuguugugcaucugagaau

SEQ ID NO: 19026 - RNA, 21 nt, Artificial Sequence
  SAMD9L targeting guide sequence portion
ggcuuaaaggaagagauucac

SEQ ID NO: 19027 - RNA, 21 nt, Artificial Sequence
  SAMD9L targeting guide sequence portion
ggcuuauuuuuuccauucauu

SEQ ID NO: 19028 - RNA, 21 nt, Artificial Sequence
  SAMD9L targeting guide sequence portion
ggcuuccucaugguaauaugu

SEQ ID NO: 19029 - RNA, 21 nt, Artificial Sequence
  SAMD9L targeting guide sequence portion
gggaacaaagaggguaaugaa

SEQ ID NO: 19030 - RNA, 21 nt, Artificial Sequence
  SAMD9L targeting guide sequence portion
gggagaugggaucuaagaaac

SEQ ID NO: 19031 - RNA, 21 nt, Artificial Sequence
  SAMD9L targeting guide sequence portion
gggaucuaagaaacaggugga

SEQ ID NO: 19032 - RNA, 21 nt, Artificial Sequence
  SAMD9L targeting guide sequence portion
gggauggcauuccuugacacu

SEQ ID NO: 19033 - RNA, 21 nt, Artificial Sequence
  SAMD9L targeting guide sequence portion
gggcuuccucaugguaauaug

SEQ ID NO: 19034 - RNA, 21 nt, Artificial Sequence
  SAMD9L targeting guide sequence portion
ggggagaugggaucuaagaaa

SEQ ID NO: 19035 - RNA, 21 nt, Artificial Sequence
  SAMD9L targeting guide sequence portion
ggguaaugaauggaaaaaaua

SEQ ID NO: 19036 - RNA, 21 nt, Artificial Sequence
  SAMD9L targeting guide sequence portion
gguaauauguguucucaaguu

SEQ ID NO: 19037 - RNA, 21 nt, Artificial Sequence
  SAMD9L targeting guide sequence portion
gguaaugaauggaaaaaauaa

SEQ ID NO: 19038 - RNA, 21 nt, Artificial Sequence
  SAMD9L targeting guide sequence portion
ggucaaggaagacuuccuggu

SEQ ID NO: 19039 - RNA, 21 nt, Artificial Sequence
  SAMD9L targeting guide sequence portion
ggugaaggugacucuugaaau

SEQ ID NO: 19040 - RNA, 21 nt, Artificial Sequence
  SAMD9L targeting guide sequence portion
ggugaaucucuuccuuuaagc

SEQ ID NO: 19041 - RNA, 21 nt, Artificial Sequence
  SAMD9L targeting guide sequence portion
ggugacucuugaaaucaguug

SEQ ID NO: 19042 - RNA, 21 nt, Artificial Sequence
  SAMD9L targeting guide sequence portion
gguggagauaaggcuguauuc

SEQ ID NO: 19043 - RNA, 21 nt, Artificial Sequence
  SAMD9L targeting guide sequence portion
gguggucaaggaagacuuccu

SEQ ID NO: 19044 - RNA, 21 nt, Artificial Sequence
  SAMD9L targeting guide sequence portion
gguugagaaguaaagggaaca

SEQ ID NO: 19045 - RNA, 21 nt, Artificial Sequence
  SAMD9L targeting guide sequence portion
guaaagggaacaaagagggua

SEQ ID NO: 19046 - RNA, 21 nt, Artificial Sequence
  SAMD9L targeting guide sequence portion
guaauauguguucucaaguuu

SEQ ID NO: 19047 - RNA, 21 nt, Artificial Sequence
  SAMD9L targeting guide sequence portion
guaaugaauggaaaaaauaag

SEQ ID NO: 19048 - RNA, 21 nt, Artificial Sequence
  SAMD9L targeting guide sequence portion
guauauagcacagguugagaa

SEQ ID NO: 19049 - RNA, 21 nt, Artificial Sequence
  SAMD9L targeting guide sequence portion
guauucacaggagacaaaaau

SEQ ID NO: 19050 - RNA, 21 nt, Artificial Sequence
  SAMD9L targeting guide sequence portion
gucaaggaagacuuccuggug

SEQ ID NO: 19051 - RNA, 21 nt, Artificial Sequence
  SAMD9L targeting guide sequence portion
gucaaggaaugccaucccaga

SEQ ID NO: 19052 - RNA, 21 nt, Artificial Sequence
  SAMD9L targeting guide sequence portion
gucaccuucaccaggaagucu

SEQ ID NO: 19053 - RNA, 21 nt, Artificial Sequence
  SAMD9L targeting guide sequence portion
gucauucacaacugauuucaa

SEQ ID NO: 19054 - RNA, 21 nt, Artificial Sequence
  SAMD9L targeting guide sequence portion
gucuccugugaauacagccuu

SEQ ID NO: 19055 - RNA, 21 nt, Artificial Sequence
  SAMD9L targeting guide sequence portion
gucuuccuugaccaccaucau

SEQ ID NO: 19056 - RNA, 21 nt, Artificial Sequence
  SAMD9L targeting guide sequence portion
gugaaacauaggcuaauauag

SEQ ID NO: 19057 - RNA, 21 nt, Artificial Sequence
  SAMD9L targeting guide sequence portion
gugaaggugacucuugaaauc

SEQ ID NO: 19058 - RNA, 21 nt, Artificial Sequence
  SAMD9L targeting guide sequence portion
gugaauacagccuuaucucca

SEQ ID NO: 19059 - RNA, 21 nt, Artificial Sequence
  SAMD9L targeting guide sequence portion
gugaaucucuuccuuuaagcc

SEQ ID NO: 19060 - RNA, 21 nt, Artificial Sequence
  SAMD9L targeting guide sequence portion
gugaaugacaaaucagaauag

SEQ ID NO: 19061 - RNA, 21 nt, Artificial Sequence
  SAMD9L targeting guide sequence portion
gugacucuugaaaucaguugu

SEQ ID NO: 19062 - RNA, 21 nt, Artificial Sequence
  SAMD9L targeting guide sequence portion
gugcaucugagaaugagcuuc

SEQ ID NO: 19063 - RNA, 21 nt, Artificial Sequence
  SAMD9L targeting guide sequence portion
gugcuauauacaugcuguucu

SEQ ID NO: 19064 - RNA, 21 nt, Artificial Sequence
  SAMD9L targeting guide sequence portion
guggagauaaggcuguauuca

SEQ ID NO: 19065 - RNA, 21 nt, Artificial Sequence
  SAMD9L targeting guide sequence portion
guggucaaggaagacuuccug

SEQ ID NO: 19066 - RNA, 21 nt, Artificial Sequence
  SAMD9L targeting guide sequence portion
gugucaaggaaugccauccca

SEQ ID NO: 19067 - RNA, 21 nt, Artificial Sequence
  SAMD9L targeting guide sequence portion
guguucucaaguuuucagugu

SEQ ID NO: 19068 - RNA, 21 nt, Artificial Sequence
  SAMD9L targeting guide sequence portion
guuagauggaaauaaggcaau

SEQ ID NO: 19069 - RNA, 21 nt, Artificial Sequence
  SAMD9L targeting guide sequence portion
guucccauuuacaggugaauc

SEQ ID NO: 19070 - RNA, 21 nt, Artificial Sequence
  SAMD9L targeting guide sequence portion
guucccuuuacuucucaaccu

SEQ ID NO: 19071 - RNA, 21 nt, Artificial Sequence
  SAMD9L targeting guide sequence portion
guucucaaguuuucaguguca

SEQ ID NO: 19072 - RNA, 21 nt, Artificial Sequence
  SAMD9L targeting guide sequence portion
guucucucuguugagauugcc

SEQ ID NO: 19073 - RNA, 21 nt, Artificial Sequence
  SAMD9L targeting guide sequence portion
guucuggcuguugugcaucug

SEQ ID NO: 19074 - RNA, 21 nt, Artificial Sequence
  SAMD9L targeting guide sequence portion
guugagaaguaaagggaacaa

SEQ ID NO: 19075 - RNA, 21 nt, Artificial Sequence
  SAMD9L targeting guide sequence portion
guugagauugccuuauuucca

SEQ ID NO: 19076 - RNA, 21 nt, Artificial Sequence
  SAMD9L targeting guide sequence portion
guugugaaugacaaaucagaa

SEQ ID NO: 19077 - RNA, 21 nt, Artificial Sequence
  SAMD9L targeting guide sequence portion
guugugcaucugagaaugagc

SEQ ID NO: 19078 - RNA, 21 nt, Artificial Sequence
  SAMD9L targeting guide sequence portion
guuucacuuuauaggcaaugc

SEQ ID NO: 19079 - RNA, 21 nt, Artificial Sequence
  SAMD9L targeting guide sequence portion
guuucuuagaucccaucuccc

SEQ ID NO: 19080 - RNA, 21 nt, Artificial Sequence
  SAMD9L targeting guide sequence portion
guuuucagugucaaggaaugc

SEQ ID NO: 19081 - RNA, 21 nt, Artificial Sequence
  SAMD9L targeting guide sequence portion
uaaaggaagagauucaccugu

SEQ ID NO: 19082 - RNA, 21 nt, Artificial Sequence
  SAMD9L targeting guide sequence portion
uaaagggaacaaagaggguaa

SEQ ID NO: 19083 - RNA, 21 nt, Artificial Sequence
  SAMD9L targeting guide sequence portion
uaaagugaaacauaggcuaau

SEQ ID NO: 19084 - RNA, 21 nt, Artificial Sequence
  SAMD9L targeting guide sequence portion
uaaauugaauauugaauaaaa

SEQ ID NO: 19085 - RNA, 21 nt, Artificial Sequence
  SAMD9L targeting guide sequence portion
uaacauucucucuccugcuau

SEQ ID NO: 19086 - RNA, 21 nt, Artificial Sequence
  SAMD9L targeting guide sequence portion
uaagaaacagguggagauaag

SEQ ID NO: 19087 - RNA, 21 nt, Artificial Sequence
  SAMD9L targeting guide sequence portion
uaagaacuacgcauugccuau

SEQ ID NO: 19088 - RNA, 21 nt, Artificial Sequence
  SAMD9L targeting guide sequence portion
uaagccaggggagaugggauc

SEQ ID NO: 19089 - RNA, 21 nt, Artificial Sequence
  SAMD9L targeting guide sequence portion
uaagccauuuuugucuccugu

SEQ ID NO: 19090 - RNA, 21 nt, Artificial Sequence
  SAMD9L targeting guide sequence portion
uaaggcaaucucaacagagag

SEQ ID NO: 19091 - RNA, 21 nt, Artificial Sequence
  SAMD9L targeting guide sequence portion
uaaggcuguauucacaggaga

SEQ ID NO: 19092 - RNA, 21 nt, Artificial Sequence
  SAMD9L targeting guide sequence portion
uaauauagauuaaauugaaua

SEQ ID NO: 19093 - RNA, 21 nt, Artificial Sequence
  SAMD9L targeting guide sequence portion
uaauauguguucucaaguuuu

SEQ ID NO: 19094 - RNA, 21 nt, Artificial Sequence
  SAMD9L targeting guide sequence portion
uaaucaggcaggaaugauggu

SEQ ID NO: 19095 - RNA, 21 nt, Artificial Sequence
  SAMD9L targeting guide sequence portion
uaaucuauauuagccuauguu

SEQ ID NO: 19096 - RNA, 21 nt, Artificial Sequence
  SAMD9L targeting guide sequence portion
uaaugaauggaaaaaauaagc

SEQ ID NO: 19097 - RNA, 21 nt, Artificial Sequence
  SAMD9L targeting guide sequence portion
uacagccuuaucuccaccugu

SEQ ID NO: 19098 - RNA, 21 nt, Artificial Sequence
  SAMD9L targeting guide sequence portion
uacaggugaaucucuuccuuu

SEQ ID NO: 19099 - RNA, 21 nt, Artificial Sequence
  SAMD9L targeting guide sequence portion
uacaugcuguucucucuguug

SEQ ID NO: 19100 - RNA, 21 nt, Artificial Sequence
  SAMD9L targeting guide sequence portion
uaccaugaggaagcccucuaa

SEQ ID NO: 19101 - RNA, 21 nt, Artificial Sequence
  SAMD9L targeting guide sequence portion
uacccucuuuguucccuuuac

SEQ ID NO: 19102 - RNA, 21 nt, Artificial Sequence
  SAMD9L targeting guide sequence portion
uacgcauugccuauaaaguga

SEQ ID NO: 19103 - RNA, 21 nt, Artificial Sequence
  SAMD9L targeting guide sequence portion
uacuucucaaccugugcuaua

SEQ ID NO: 19104 - RNA, 21 nt, Artificial Sequence
  SAMD9L targeting guide sequence portion
uagaaugcugcuugagacugu

SEQ ID NO: 19105 - RNA, 21 nt, Artificial Sequence
  SAMD9L targeting guide sequence portion
uagagggcuuccucaugguaa

SEQ ID NO: 19106 - RNA, 21 nt, Artificial Sequence
  SAMD9L targeting guide sequence portion
uagaucccaucuccccuggcu

SEQ ID NO: 19107 - RNA, 21 nt, Artificial Sequence
  SAMD9L targeting guide sequence portion
uagauggaaauaaggcaaucu

SEQ ID NO: 19108 - RNA, 21 nt, Artificial Sequence
  SAMD9L targeting guide sequence portion
uagauuaaauugaauauugaa

SEQ ID NO: 19109 - RNA, 21 nt, Artificial Sequence
  SAMD9L targeting guide sequence portion
uagcacagguugagaaguaaa

SEQ ID NO: 19110 - RNA, 21 nt, Artificial Sequence
  SAMD9L targeting guide sequence portion
uagcaggagagagaauguuag

SEQ ID NO: 19111 - RNA, 21 nt, Artificial Sequence
  SAMD9L targeting guide sequence portion
uagccuauguuucacuuuaua

SEQ ID NO: 19112 - RNA, 21 nt, Artificial Sequence
  SAMD9L targeting guide sequence portion
uaggcaaugcguaguucuuaa

SEQ ID NO: 19113 - RNA, 21 nt, Artificial Sequence
  SAMD9L targeting guide sequence portion
uaggcuaauauagauuaaauu

SEQ ID NO: 19114 - RNA, 21 nt, Artificial Sequence
  SAMD9L targeting guide sequence portion
uauaaagugaaacauaggcua

SEQ ID NO: 19115 - RNA, 21 nt, Artificial Sequence
  SAMD9L targeting guide sequence portion
uauacaugcuguucucucugu

SEQ ID NO: 19116 - RNA, 21 nt, Artificial Sequence
  SAMD9L targeting guide sequence portion
uauagauuaaauugaauauug

SEQ ID NO: 19117 - RNA, 21 nt, Artificial Sequence
  SAMD9L targeting guide sequence portion
uauagcacagguugagaagua

SEQ ID NO: 19118 - RNA, 21 nt, Artificial Sequence
  SAMD9L targeting guide sequence portion
uauaggcaaugcguaguucuu

SEQ ID NO: 19119 - RNA, 21 nt, Artificial Sequence
  SAMD9L targeting guide sequence portion
uauauacaugcuguucucucu

SEQ ID NO: 19120 - RNA, 21 nt, Artificial Sequence
  SAMD9L targeting guide sequence portion
uauauagcacagguugagaag

SEQ ID NO: 19121 - RNA, 21 nt, Artificial Sequence
  SAMD9L targeting guide sequence portion
uauauuagccuauguuucacu

SEQ ID NO: 19122 - RNA, 21 nt, Artificial Sequence
  SAMD9L targeting guide sequence portion
uauauuuuuuauucaauauuc

SEQ ID NO: 19123 - RNA, 21 nt, Artificial Sequence
  SAMD9L targeting guide sequence portion
uaucuccaccuguuucuuaga

SEQ ID NO: 19124 - RNA, 21 nt, Artificial Sequence
  SAMD9L targeting guide sequence portion
uauguguucucaaguuuucag

SEQ ID NO: 19125 - RNA, 21 nt, Artificial Sequence
  SAMD9L targeting guide sequence portion
uauguuucacuuuauaggcaa

SEQ ID NO: 19126 - RNA, 21 nt, Artificial Sequence
  SAMD9L targeting guide sequence portion
uauuaccaugaggaagcccuc

SEQ ID NO: 19127 - RNA, 21 nt, Artificial Sequence
  SAMD9L targeting guide sequence portion
uauuagccuauguuucacuuu

SEQ ID NO: 19128 - RNA, 21 nt, Artificial Sequence
  SAMD9L targeting guide sequence portion
uauucaauauucaauuuaauc

SEQ ID NO: 19129 - RNA, 21 nt, Artificial Sequence
  SAMD9L targeting guide sequence portion
uauucaauuuaaucuauauua

SEQ ID NO: 19130 - RNA, 21 nt, Artificial Sequence
  SAMD9L targeting guide sequence portion
uauucacaggagacaaaaaug

SEQ ID NO: 19131 - RNA, 21 nt, Artificial Sequence
  SAMD9L targeting guide sequence portion
uauucugauuugucauucaca

SEQ ID NO: 19132 - RNA, 21 nt, Artificial Sequence
  SAMD9L targeting guide sequence portion
uauuuccaucuaacauucucu

SEQ ID NO: 19133 - RNA, 21 nt, Artificial Sequence
  SAMD9L targeting guide sequence portion
uauuuuuuauucaauauucaa

SEQ ID NO: 19134 - RNA, 21 nt, Artificial Sequence
  SAMD9L targeting guide sequence portion
uauuuuuuccauucauuaccc

SEQ ID NO: 19135 - RNA, 21 nt, Artificial Sequence
  SAMD9L targeting guide sequence portion
ucaacagagagaacagcaugu

SEQ ID NO: 19136 - RNA, 21 nt, Artificial Sequence
  SAMD9L targeting guide sequence portion
ucaaccugugcuauauacaug

SEQ ID NO: 19137 - RNA, 21 nt, Artificial Sequence
  SAMD9L targeting guide sequence portion
ucaagagucaccuucaccagg

SEQ ID NO: 19138 - RNA, 21 nt, Artificial Sequence
  SAMD9L targeting guide sequence portion
ucaaggaagacuuccugguga

SEQ ID NO: 19139 - RNA, 21 nt, Artificial Sequence
  SAMD9L targeting guide sequence portion
ucaaggaaugccaucccagaa

SEQ ID NO: 19140 - RNA, 21 nt, Artificial Sequence
  SAMD9L targeting guide sequence portion
ucaaguuuucagugucaagga

SEQ ID NO: 19141 - RNA, 21 nt, Artificial Sequence
  SAMD9L targeting guide sequence portion
ucaauauucaauuuaaucuau

SEQ ID NO: 19142 - RNA, 21 nt, Artificial Sequence
  SAMD9L targeting guide sequence portion
ucaauuuaaucuauauuagcc

SEQ ID NO: 19143 - RNA, 21 nt, Artificial Sequence
  SAMD9L targeting guide sequence portion
ucacaacugauuucaagaguc

SEQ ID NO: 19144 - RNA, 21 nt, Artificial Sequence
  SAMD9L targeting guide sequence portion
ucacaggagacaaaaauggcu

SEQ ID NO: 19145 - RNA, 21 nt, Artificial Sequence
  SAMD9L targeting guide sequence portion
ucaccaggaagucuuccuuga

SEQ ID NO: 19146 - RNA, 21 nt, Artificial Sequence
  SAMD9L targeting guide sequence portion
ucaccuucaccaggaagucuu

SEQ ID NO: 19147 - RNA, 21 nt, Artificial Sequence
  SAMD9L targeting guide sequence portion
ucacuuuauaggcaaugcgua

SEQ ID NO: 19148 - RNA, 21 nt, Artificial Sequence
  SAMD9L targeting guide sequence portion
ucagaauagcaggagagagaa

SEQ ID NO: 19149 - RNA, 21 nt, Artificial Sequence
  SAMD9L targeting guide sequence portion
ucagaugcacaacagccagaa

SEQ ID NO: 19150 - RNA, 21 nt, Artificial Sequence
  SAMD9L targeting guide sequence portion
ucaggcaggaaugaugguggu

SEQ ID NO: 19151 - RNA, 21 nt, Artificial Sequence
  SAMD9L targeting guide sequence portion
ucagugucaaggaaugccauc

SEQ ID NO: 19152 - RNA, 21 nt, Artificial Sequence
  SAMD9L targeting guide sequence portion
ucaguugugaaugacaaauca

SEQ ID NO: 19153 - RNA, 21 nt, Artificial Sequence
  SAMD9L targeting guide sequence portion
ucaugguaauauguguucuca

SEQ ID NO: 19154 - RNA, 21 nt, Artificial Sequence
  SAMD9L targeting guide sequence portion
ucauuacccucuuuguucccu

SEQ ID NO: 19155 - RNA, 21 nt, Artificial Sequence
  SAMD9L targeting guide sequence portion
ucauucacaacugauuucaag

SEQ ID NO: 19156 - RNA, 21 nt, Artificial Sequence
  SAMD9L targeting guide sequence portion
ucauuccugccugauuagagg

SEQ ID NO: 19157 - RNA, 21 nt, Artificial Sequence
  SAMD9L targeting guide sequence portion
ucauucucagaugcacaacag

SEQ ID NO: 19158 - RNA, 21 nt, Artificial Sequence
  SAMD9L targeting guide sequence portion
uccaccuguuucuuagauccc

SEQ ID NO: 19159 - RNA, 21 nt, Artificial Sequence
  SAMD9L targeting guide sequence portion
uccaucuaacauucucucucc

SEQ ID NO: 19160 - RNA, 21 nt, Artificial Sequence
  SAMD9L targeting guide sequence portion
uccauucauuacccucuuugu

SEQ ID NO: 19161 - RNA, 21 nt, Artificial Sequence
  SAMD9L targeting guide sequence portion
ucccagaagcucauucucaga

SEQ ID NO: 19162 - RNA, 21 nt, Artificial Sequence
  SAMD9L targeting guide sequence portion
ucccaucuccccuggcuuauu

SEQ ID NO: 19163 - RNA, 21 nt, Artificial Sequence
  SAMD9L targeting guide sequence portion
ucccauuuacaggugaaucuc

SEQ ID NO: 19164 - RNA, 21 nt, Artificial Sequence
  SAMD9L targeting guide sequence portion
uccccuggcuuauuuuuucca

SEQ ID NO: 19165 - RNA, 21 nt, Artificial Sequence
  SAMD9L targeting guide sequence portion
ucccuuuacuucucaaccugu

SEQ ID NO: 19166 - RNA, 21 nt, Artificial Sequence
  SAMD9L targeting guide sequence portion
uccucaugguaauauguguuc

SEQ ID NO: 19167 - RNA, 21 nt, Artificial Sequence
  SAMD9L targeting guide sequence portion
uccugccugauuagagggcuu

SEQ ID NO: 19168 - RNA, 21 nt, Artificial Sequence
  SAMD9L targeting guide sequence portion
uccugcuauucugauuuguca

SEQ ID NO: 19169 - RNA, 21 nt, Artificial Sequence
  SAMD9L targeting guide sequence portion
uccuggugaaggugacucuug

SEQ ID NO: 19170 - RNA, 21 nt, Artificial Sequence
  SAMD9L targeting guide sequence portion
uccugugaauacagccuuauc

SEQ ID NO: 19171 - RNA, 21 nt, Artificial Sequence
  SAMD9L targeting guide sequence portion
uccuugacacugaaaacuuga

SEQ ID NO: 19172 - RNA, 21 nt, Artificial Sequence
  SAMD9L targeting guide sequence portion
uccuugaccaccaucauuccu

SEQ ID NO: 19173 - RNA, 21 nt, Artificial Sequence
  SAMD9L targeting guide sequence portion
uccuuuaagccauuuuugucu

SEQ ID NO: 19174 - RNA, 21 nt, Artificial Sequence
  SAMD9L targeting guide sequence portion
ucuaacauucucucuccugcu

SEQ ID NO: 19175 - RNA, 21 nt, Artificial Sequence
  SAMD9L targeting guide sequence portion
ucuaagaaacagguggagaua

SEQ ID NO: 19176 - RNA, 21 nt, Artificial Sequence
  SAMD9L targeting guide sequence portion
ucuaaucaggcaggaaugaug

SEQ ID NO: 19177 - RNA, 21 nt, Artificial Sequence
  SAMD9L targeting guide sequence portion
ucuagaaugcugcuugagacu

SEQ ID NO: 19178 - RNA, 21 nt, Artificial Sequence
  SAMD9L targeting guide sequence portion
ucuauauuagccuauguuuca

SEQ ID NO: 19179 - RNA, 21 nt, Artificial Sequence
  SAMD9L targeting guide sequence portion
ucucaacagagagaacagcau

SEQ ID NO: 19180 - RNA, 21 nt, Artificial Sequence
  SAMD9L targeting guide sequence portion
ucucaaccugugcuauauaca

SEQ ID NO: 19181 - RNA, 21 nt, Artificial Sequence
  SAMD9L targeting guide sequence portion
ucucaaguuuucagugucaag

SEQ ID NO: 19182 - RNA, 21 nt, Artificial Sequence
  SAMD9L targeting guide sequence portion
ucucagaugcacaacagccag

SEQ ID NO: 19183 - RNA, 21 nt, Artificial Sequence
  SAMD9L targeting guide sequence portion
ucuccaccuguuucuuagauc

SEQ ID NO: 19184 - RNA, 21 nt, Artificial Sequence
  SAMD9L targeting guide sequence portion
ucuccccuggcuuauuuuuuc

SEQ ID NO: 19185 - RNA, 21 nt, Artificial Sequence
  SAMD9L targeting guide sequence portion
ucuccugcuauucugauuugu

SEQ ID NO: 19186 - RNA, 21 nt, Artificial Sequence
  SAMD9L targeting guide sequence portion
ucuccugugaauacagccuua

SEQ ID NO: 19187 - RNA, 21 nt, Artificial Sequence
  SAMD9L targeting guide sequence portion
ucucuccugcuauucugauuu

SEQ ID NO: 19188 - RNA, 21 nt, Artificial Sequence
  SAMD9L targeting guide sequence portion
ucucucuccugcuauucugau

SEQ ID NO: 19189 - RNA, 21 nt, Artificial Sequence
  SAMD9L targeting guide sequence portion
ucucucuguugagauugccuu

SEQ ID NO: 19190 - RNA, 21 nt, Artificial Sequence
  SAMD9L targeting guide sequence portion
ucucuguugagauugccuuau

SEQ ID NO: 19191 - RNA, 21 nt, Artificial Sequence
  SAMD9L targeting guide sequence portion
ucucuuccuuuaagccauuuu

SEQ ID NO: 19192 - RNA, 21 nt, Artificial Sequence
  SAMD9L targeting guide sequence portion
ucugagaaugagcuucuggga

SEQ ID NO: 19193 - RNA, 21 nt, Artificial Sequence
  SAMD9L targeting guide sequence portion
ucugauuugucauucacaacu

SEQ ID NO: 19194 - RNA, 21 nt, Artificial Sequence
  SAMD9L targeting guide sequence portion
ucuggcuguugugcaucugag

SEQ ID NO: 19195 - RNA, 21 nt, Artificial Sequence
  SAMD9L targeting guide sequence portion
ucugggauggcauuccuugac

SEQ ID NO: 19196 - RNA, 21 nt, Artificial Sequence
  SAMD9L targeting guide sequence portion
ucuguugagauugccuuauuu

SEQ ID NO: 19197 - RNA, 21 nt, Artificial Sequence
  SAMD9L targeting guide sequence portion
ucuuagaucccaucuccccug

SEQ ID NO: 19198 - RNA, 21 nt, Artificial Sequence
  SAMD9L targeting guide sequence portion
ucuuccuugaccaccaucauu

SEQ ID NO: 19199 - RNA, 21 nt, Artificial Sequence
  SAMD9L targeting guide sequence portion
ucuuccuuuaagccauuuuug

SEQ ID NO: 19200 - RNA, 21 nt, Artificial Sequence
  SAMD9L targeting guide sequence portion
ucuugaaaucaguugugaaug

SEQ ID NO: 19201 - RNA, 21 nt, Artificial Sequence
  SAMD9L targeting guide sequence portion
ucuuguucccauuuacaggug

SEQ ID NO: 19202 - RNA, 21 nt, Artificial Sequence
  SAMD9L targeting guide sequence portion
ucuuuguucccuuuacuucuc

SEQ ID NO: 19203 - RNA, 21 nt, Artificial Sequence
  SAMD9L targeting guide sequence portion
ugaaaacuugagaacacauau

SEQ ID NO: 19204 - RNA, 21 nt, Artificial Sequence
  SAMD9L targeting guide sequence portion
ugaaacauaggcuaauauaga

SEQ ID NO: 19205 - RNA, 21 nt, Artificial Sequence
  SAMD9L targeting guide sequence portion
ugaaaucaguugugaaugaca

SEQ ID NO: 19206 - RNA, 21 nt, Artificial Sequence
  SAMD9L targeting guide sequence portion
ugaaggugacucuugaaauca

SEQ ID NO: 19207 - RNA, 21 nt, Artificial Sequence
  SAMD9L targeting guide sequence portion
ugaauacagccuuaucuccac

SEQ ID NO: 19208 - RNA, 21 nt, Artificial Sequence
  SAMD9L targeting guide sequence portion
ugaaucucuuccuuuaagcca

SEQ ID NO: 19209 - RNA, 21 nt, Artificial Sequence
  SAMD9L targeting guide sequence portion
ugaaugacaaaucagaauagc

SEQ ID NO: 19210 - RNA, 21 nt, Artificial Sequence
  SAMD9L targeting guide sequence portion
ugaauggaaaaaauaagccag

SEQ ID NO: 19211 - RNA, 21 nt, Artificial Sequence
  SAMD9L targeting guide sequence portion
ugacaaaucagaauagcagga

SEQ ID NO: 19212 - RNA, 21 nt, Artificial Sequence
  SAMD9L targeting guide sequence portion
ugacacugaaaacuugagaac

SEQ ID NO: 19213 - RNA, 21 nt, Artificial Sequence
  SAMD9L targeting guide sequence portion
ugaccaccaucauuccugccu

SEQ ID NO: 19214 - RNA, 21 nt, Artificial Sequence
  SAMD9L targeting guide sequence portion
ugacucuugaaaucaguugug

SEQ ID NO: 19215 - RNA, 21 nt, Artificial Sequence
  SAMD9L targeting guide sequence portion
ugagaacacauauuaccauga

SEQ ID NO: 19216 - RNA, 21 nt, Artificial Sequence
  SAMD9L targeting guide sequence portion
ugagaaguaaagggaacaaag

SEQ ID NO: 19217 - RNA, 21 nt, Artificial Sequence
  SAMD9L targeting guide sequence portion
ugagaaugagcuucugggaug

SEQ ID NO: 19218 - RNA, 21 nt, Artificial Sequence
  SAMD9L targeting guide sequence portion
ugagacuguucuggcuguugu

SEQ ID NO: 19219 - RNA, 21 nt, Artificial Sequence
  SAMD9L targeting guide sequence portion
ugagauugccuuauuuccauc

SEQ ID NO: 19220 - RNA, 21 nt, Artificial Sequence
  SAMD9L targeting guide sequence portion
ugagcuucugggauggcauuc

SEQ ID NO: 19221 - RNA, 21 nt, Artificial Sequence
  SAMD9L targeting guide sequence portion
ugaggaagcccucuaaucagg

SEQ ID NO: 19222 - RNA, 21 nt, Artificial Sequence
  SAMD9L targeting guide sequence portion
ugaugguggucaaggaagacu

SEQ ID NO: 19223 - RNA, 21 nt, Artificial Sequence
  SAMD9L targeting guide sequence portion
ugauuagagggcuuccucaug

SEQ ID NO: 19224 - RNA, 21 nt, Artificial Sequence
  SAMD9L targeting guide sequence portion
ugauuucaagagucaccuuca

SEQ ID NO: 19225 - RNA, 21 nt, Artificial Sequence
  SAMD9L targeting guide sequence portion
ugauuugucauucacaacuga

SEQ ID NO: 19226 - RNA, 21 nt, Artificial Sequence
  SAMD9L targeting guide sequence portion
ugcacaacagccagaacaguc

SEQ ID NO: 19227 - RNA, 21 nt, Artificial Sequence
  SAMD9L targeting guide sequence portion
ugcaucugagaaugagcuucu

SEQ ID NO: 19228 - RNA, 21 nt, Artificial Sequence
  SAMD9L targeting guide sequence portion
ugccaucccagaagcucauuc

SEQ ID NO: 19229 - RNA, 21 nt, Artificial Sequence
  SAMD9L targeting guide sequence portion
ugccuauaaagugaaacauag

SEQ ID NO: 19230 - RNA, 21 nt, Artificial Sequence
  SAMD9L targeting guide sequence portion
ugccugauuagagggcuuccu

SEQ ID NO: 19231 - RNA, 21 nt, Artificial Sequence
  SAMD9L targeting guide sequence portion
ugccuuauuuccaucuaacau

SEQ ID NO: 19232 - RNA, 21 nt, Artificial Sequence
  SAMD9L targeting guide sequence portion
ugcuauauacaugcuguucuc

SEQ ID NO: 19233 - RNA, 21 nt, Artificial Sequence
  SAMD9L targeting guide sequence portion
ugcuauucugauuugucauuc

SEQ ID NO: 19234 - RNA, 21 nt, Artificial Sequence
  SAMD9L targeting guide sequence portion
ugcugcuugagacuguucugg

SEQ ID NO: 19235 - RNA, 21 nt, Artificial Sequence
  SAMD9L targeting guide sequence portion
ugcuguucucucuguugagau

SEQ ID NO: 19236 - RNA, 21 nt, Artificial Sequence
  SAMD9L targeting guide sequence portion
ugcuugagacuguucuggcug

SEQ ID NO: 19237 - RNA, 21 nt, Artificial Sequence
  SAMD9L targeting guide sequence portion
uggaaaaaauaagccagggga

SEQ ID NO: 19238 - RNA, 21 nt, Artificial Sequence
  SAMD9L targeting guide sequence portion
uggaaauaaggcaaucucaac

SEQ ID NO: 19239 - RNA, 21 nt, Artificial Sequence
  SAMD9L targeting guide sequence portion
uggaauuuaagaacuacgcau

SEQ ID NO: 19240 - RNA, 21 nt, Artificial Sequence
  SAMD9L targeting guide sequence portion
uggagauaaggcuguauucac

SEQ ID NO: 19241 - RNA, 21 nt, Artificial Sequence
  SAMD9L targeting guide sequence portion
uggcauuccuugacacugaaa

SEQ ID NO: 19242 - RNA, 21 nt, Artificial Sequence
  SAMD9L targeting guide sequence portion
uggcuguugugcaucugagaa

SEQ ID NO: 19243 - RNA, 21 nt, Artificial Sequence
  SAMD9L targeting guide sequence portion
uggcuuaaaggaagagauuca

SEQ ID NO: 19244 - RNA, 21 nt, Artificial Sequence
  SAMD9L targeting guide sequence portion
uggcuuauuuuuuccauucau

SEQ ID NO: 19245 - RNA, 21 nt, Artificial Sequence
  SAMD9L targeting guide sequence portion
ugggaucuaagaaacaggugg

SEQ ID NO: 19246 - RNA, 21 nt, Artificial Sequence
  SAMD9L targeting guide sequence portion
ugggauggcauuccuugacac

SEQ ID NO: 19247 - RNA, 21 nt, Artificial Sequence
  SAMD9L targeting guide sequence portion
ugguaauauguguucucaagu

SEQ ID NO: 19248 - RNA, 21 nt, Artificial Sequence
  SAMD9L targeting guide sequence portion
uggucaaggaagacuuccugg

SEQ ID NO: 19249 - RNA, 21 nt, Artificial Sequence
  SAMD9L targeting guide sequence portion
uggugaaggugacucuugaaa

SEQ ID NO: 19250 - RNA, 21 nt, Artificial Sequence
  SAMD9L targeting guide sequence portion
ugguggucaaggaagacuucc

SEQ ID NO: 19251 - RNA, 21 nt, Artificial Sequence
  SAMD9L targeting guide sequence portion
uguauauagcacagguugaga

SEQ ID NO: 19252 - RNA, 21 nt, Artificial Sequence
  SAMD9L targeting guide sequence portion
uguauucacaggagacaaaaa

SEQ ID NO: 19253 - RNA, 21 nt, Artificial Sequence
  SAMD9L targeting guide sequence portion
ugucaaggaaugccaucccag

SEQ ID NO: 19254 - RNA, 21 nt, Artificial Sequence
  SAMD9L targeting guide sequence portion
ugucauucacaacugauuuca

SEQ ID NO: 19255 - RNA, 21 nt, Artificial Sequence
  SAMD9L targeting guide sequence portion
ugucuccugugaauacagccu

SEQ ID NO: 19256 - RNA, 21 nt, Artificial Sequence
  SAMD9L targeting guide sequence portion
ugugaauacagccuuaucucc

SEQ ID NO: 19257 - RNA, 21 nt, Artificial Sequence
  SAMD9L targeting guide sequence portion
ugugaaugacaaaucagaaua

SEQ ID NO: 19258 - RNA, 21 nt, Artificial Sequence
  SAMD9L targeting guide sequence portion
ugugcaucugagaaugagcuu

SEQ ID NO: 19259 - RNA, 21 nt, Artificial Sequence
  SAMD9L targeting guide sequence portion
ugugcuauauacaugcuguuc

SEQ ID NO: 19260 - RNA, 21 nt, Artificial Sequence
  SAMD9L targeting guide sequence portion
uguguucucaaguuuucagug

SEQ ID NO: 19261 - RNA, 21 nt, Artificial Sequence
  SAMD9L targeting guide sequence portion
uguuagauggaaauaaggcaa

SEQ ID NO: 19262 - RNA, 21 nt, Artificial Sequence
  SAMD9L targeting guide sequence portion
uguucccauuuacaggugaau

SEQ ID NO: 19263 - RNA, 21 nt, Artificial Sequence
  SAMD9L targeting guide sequence portion
uguucccuuuacuucucaacc

SEQ ID NO: 19264 - RNA, 21 nt, Artificial Sequence
  SAMD9L targeting guide sequence portion
uguucucaaguuuucaguguc

SEQ ID NO: 19265 - RNA, 21 nt, Artificial Sequence
  SAMD9L targeting guide sequence portion
uguucucucuguugagauugc

SEQ ID NO: 19266 - RNA, 21 nt, Artificial Sequence
  SAMD9L targeting guide sequence portion
uguucuggcuguugugcaucu

SEQ ID NO: 19267 - RNA, 21 nt, Artificial Sequence
  SAMD9L targeting guide sequence portion
uguugagauugccuuauuucc

SEQ ID NO: 19268 - RNA, 21 nt, Artificial Sequence
  SAMD9L targeting guide sequence portion
uguugugcaucugagaaugag

SEQ ID NO: 19269 - RNA, 21 nt, Artificial Sequence
  SAMD9L targeting guide sequence portion
uguuucacuuuauaggcaaug

SEQ ID NO: 19270 - RNA, 21 nt, Artificial Sequence
  SAMD9L targeting guide sequence portion
uguuucuuagaucccaucucc

SEQ ID NO: 19271 - RNA, 21 nt, Artificial Sequence
  SAMD9L targeting guide sequence portion
uuaaaggaagagauucaccug

SEQ ID NO: 19272 - RNA, 21 nt, Artificial Sequence
  SAMD9L targeting guide sequence portion
uuaaauugaauauugaauaaa

SEQ ID NO: 19273 - RNA, 21 nt, Artificial Sequence
  SAMD9L targeting guide sequence portion
uuaagaacuacgcauugccua

SEQ ID NO: 19274 - RNA, 21 nt, Artificial Sequence
  SAMD9L targeting guide sequence portion
uuaagccauuuuugucuccug

SEQ ID NO: 19275 - RNA, 21 nt, Artificial Sequence
  SAMD9L targeting guide sequence portion
uuaaucuauauuagccuaugu

SEQ ID NO: 19276 - RNA, 21 nt, Artificial Sequence
  SAMD9L targeting guide sequence portion
uuacaggugaaucucuuccuu

SEQ ID NO: 19277 - RNA, 21 nt, Artificial Sequence
  SAMD9L targeting guide sequence portion
uuaccaugaggaagcccucua

SEQ ID NO: 19278 - RNA, 21 nt, Artificial Sequence
  SAMD9L targeting guide sequence portion
uuacccucuuuguucccuuua

SEQ ID NO: 19279 - RNA, 21 nt, Artificial Sequence
  SAMD9L targeting guide sequence portion
uuacuucucaaccugugcuau

SEQ ID NO: 19280 - RNA, 21 nt, Artificial Sequence
  SAMD9L targeting guide sequence portion
uuagagggcuuccucauggua

SEQ ID NO: 19281 - RNA, 21 nt, Artificial Sequence
  SAMD9L targeting guide sequence portion
uuagaucccaucuccccuggc

SEQ ID NO: 19282 - RNA, 21 nt, Artificial Sequence
  SAMD9L targeting guide sequence portion
uuagauggaaauaaggcaauc

SEQ ID NO: 19283 - RNA, 21 nt, Artificial Sequence
  SAMD9L targeting guide sequence portion
uuagccuauguuucacuuuau

SEQ ID NO: 19284 - RNA, 21 nt, Artificial Sequence
  SAMD9L targeting guide sequence portion
uuauaggcaaugcguaguucu

SEQ ID NO: 19285 - RNA, 21 nt, Artificial Sequence
  SAMD9L targeting guide sequence portion
uuaucuccaccuguuucuuag

SEQ ID NO: 19286 - RNA, 21 nt, Artificial Sequence
  SAMD9L targeting guide sequence portion
uuauucaauauucaauuuaau

SEQ ID NO: 19287 - RNA, 21 nt, Artificial Sequence
  SAMD9L targeting guide sequence portion
uuauuuccaucuaacauucuc

SEQ ID NO: 19288 - RNA, 21 nt, Artificial Sequence
  SAMD9L targeting guide sequence portion
uuauuuuuuccauucauuacc

SEQ ID NO: 19289 - RNA, 21 nt, Artificial Sequence
  SAMD9L targeting guide sequence portion
uucaagagucaccuucaccag

SEQ ID NO: 19290 - RNA, 21 nt, Artificial Sequence
  SAMD9L targeting guide sequence portion
uucaauauucaauuuaaucua

SEQ ID NO: 19291 - RNA, 21 nt, Artificial Sequence
  SAMD9L targeting guide sequence portion
uucaauuuaaucuauauuagc

SEQ ID NO: 19292 - RNA, 21 nt, Artificial Sequence
  SAMD9L targeting guide sequence portion
uucacaacugauuucaagagu

SEQ ID NO: 19293 - RNA, 21 nt, Artificial Sequence
  SAMD9L targeting guide sequence portion
uucacaggagacaaaaauggc

SEQ ID NO: 19294 - RNA, 21 nt, Artificial Sequence
  SAMD9L targeting guide sequence portion
uucaccaggaagucuuccuug

SEQ ID NO: 19295 - RNA, 21 nt, Artificial Sequence
  SAMD9L targeting guide sequence portion
uucacuuuauaggcaaugcgu

SEQ ID NO: 19296 - RNA, 21 nt, Artificial Sequence
  SAMD9L targeting guide sequence portion
uucagugucaaggaaugccau

SEQ ID NO: 19297 - RNA, 21 nt, Artificial Sequence
  SAMD9L targeting guide sequence portion
uucauuacccucuuuguuccc

SEQ ID NO: 19298 - RNA, 21 nt, Artificial Sequence
  SAMD9L targeting guide sequence portion
uuccaucuaacauucucucuc

SEQ ID NO: 19299 - RNA, 21 nt, Artificial Sequence
  SAMD9L targeting guide sequence portion
uuccauucauuacccucuuug

SEQ ID NO: 19300 - RNA, 21 nt, Artificial Sequence
  SAMD9L targeting guide sequence portion
uucccauuuacaggugaaucu

SEQ ID NO: 19301 - RNA, 21 nt, Artificial Sequence
  SAMD9L targeting guide sequence portion
uucccuuuacuucucaaccug

SEQ ID NO: 19302 - RNA, 21 nt, Artificial Sequence
  SAMD9L targeting guide sequence portion
uuccucaugguaauauguguu

SEQ ID NO: 19303 - RNA, 21 nt, Artificial Sequence
  SAMD9L targeting guide sequence portion
uuccugccugauuagagggcu

SEQ ID NO: 19304 - RNA, 21 nt, Artificial Sequence
  SAMD9L targeting guide sequence portion
uuccuggugaaggugacucuu

SEQ ID NO: 19305 - RNA, 21 nt, Artificial Sequence
  SAMD9L targeting guide sequence portion
uuccuugacacugaaaacuug

SEQ ID NO: 19306 - RNA, 21 nt, Artificial Sequence
  SAMD9L targeting guide sequence portion
uuccuugaccaccaucauucc

SEQ ID NO: 19307 - RNA, 21 nt, Artificial Sequence
  SAMD9L targeting guide sequence portion
uuccuuuaagccauuuuuguc

SEQ ID NO: 19308 - RNA, 21 nt, Artificial Sequence
  SAMD9L targeting guide sequence portion
uucucaaccugugcuauauac

SEQ ID NO: 19309 - RNA, 21 nt, Artificial Sequence
  SAMD9L targeting guide sequence portion
uucucaaguuuucagugucaa

SEQ ID NO: 19310 - RNA, 21 nt, Artificial Sequence
  SAMD9L targeting guide sequence portion
uucucagaugcacaacagcca

SEQ ID NO: 19311 - RNA, 21 nt, Artificial Sequence
  SAMD9L targeting guide sequence portion
uucucucuccugcuauucuga

SEQ ID NO: 19312 - RNA, 21 nt, Artificial Sequence
  SAMD9L targeting guide sequence portion
uucucucuguugagauugccu

SEQ ID NO: 19313 - RNA, 21 nt, Artificial Sequence
  SAMD9L targeting guide sequence portion
uucugauuugucauucacaac

SEQ ID NO: 19314 - RNA, 21 nt, Artificial Sequence
  SAMD9L targeting guide sequence portion
uucuggcuguugugcaucuga

SEQ ID NO: 19315 - RNA, 21 nt, Artificial Sequence
  SAMD9L targeting guide sequence portion
uucugggauggcauuccuuga

SEQ ID NO: 19316 - RNA, 21 nt, Artificial Sequence
  SAMD9L targeting guide sequence portion
uucuuagaucccaucuccccu

SEQ ID NO: 19317 - RNA, 21 nt, Artificial Sequence
  SAMD9L targeting guide sequence portion
uugaaaucaguugugaaugac

SEQ ID NO: 19318 - RNA, 21 nt, Artificial Sequence
  SAMD9L targeting guide sequence portion
uugacacugaaaacuugagaa

SEQ ID NO: 19319 - RNA, 21 nt, Artificial Sequence
  SAMD9L targeting guide sequence portion
uugaccaccaucauuccugcc

SEQ ID NO: 19320 - RNA, 21 nt, Artificial Sequence
  SAMD9L targeting guide sequence portion
uugagaacacauauuaccaug

SEQ ID NO: 19321 - RNA, 21 nt, Artificial Sequence
  SAMD9L targeting guide sequence portion
uugagaaguaaagggaacaaa

SEQ ID NO: 19322 - RNA, 21 nt, Artificial Sequence
  SAMD9L targeting guide sequence portion
uugagacuguucuggcuguug

SEQ ID NO: 19323 - RNA, 21 nt, Artificial Sequence
  SAMD9L targeting guide sequence portion
uugagauugccuuauuuccau

SEQ ID NO: 19324 - RNA, 21 nt, Artificial Sequence
  SAMD9L targeting guide sequence portion
uugccuauaaagugaaacaua

SEQ ID NO: 19325 - RNA, 21 nt, Artificial Sequence
  SAMD9L targeting guide sequence portion
uugccuuauuuccaucuaaca

SEQ ID NO: 19326 - RNA, 21 nt, Artificial Sequence
  SAMD9L targeting guide sequence portion
uugucauucacaacugauuuc

SEQ ID NO: 19327 - RNA, 21 nt, Artificial Sequence
  SAMD9L targeting guide sequence portion
uugucuccugugaauacagcc

SEQ ID NO: 19328 - RNA, 21 nt, Artificial Sequence
  SAMD9L targeting guide sequence portion
uugugaaugacaaaucagaau

SEQ ID NO: 19329 - RNA, 21 nt, Artificial Sequence
  SAMD9L targeting guide sequence portion
uugugcaucugagaaugagcu

SEQ ID NO: 19330 - RNA, 21 nt, Artificial Sequence
  SAMD9L targeting guide sequence portion
uuguucccauuuacaggugaa

SEQ ID NO: 19331 - RNA, 21 nt, Artificial Sequence
  SAMD9L targeting guide sequence portion
uuguucccuuuacuucucaac

SEQ ID NO: 19332 - RNA, 21 nt, Artificial Sequence
  SAMD9L targeting guide sequence portion
uuuaagaacuacgcauugccu

SEQ ID NO: 19333 - RNA, 21 nt, Artificial Sequence
  SAMD9L targeting guide sequence portion
uuuaagccauuuuugucuccu

SEQ ID NO: 19334 - RNA, 21 nt, Artificial Sequence
  SAMD9L targeting guide sequence portion
uuuaaucuauauuagccuaug

SEQ ID NO: 19335 - RNA, 21 nt, Artificial Sequence
  SAMD9L targeting guide sequence portion
uuuacaggugaaucucuuccu

SEQ ID NO: 19336 - RNA, 21 nt, Artificial Sequence
  SAMD9L targeting guide sequence portion
uuuacuucucaaccugugcua

SEQ ID NO: 19337 - RNA, 21 nt, Artificial Sequence
  SAMD9L targeting guide sequence portion
uuuauaggcaaugcguaguuc

SEQ ID NO: 19338 - RNA, 21 nt, Artificial Sequence
  SAMD9L targeting guide sequence portion
uuuauucaauauucaauuuaa

SEQ ID NO: 19339 - RNA, 21 nt, Artificial Sequence
  SAMD9L targeting guide sequence portion
uuucaagagucaccuucacca

SEQ ID NO: 19340 - RNA, 21 nt, Artificial Sequence
  SAMD9L targeting guide sequence portion
uuucacuuuauaggcaaugcg

SEQ ID NO: 19341 - RNA, 21 nt, Artificial Sequence
  SAMD9L targeting guide sequence portion
uuucagugucaaggaaugcca

SEQ ID NO: 19342 - RNA, 21 nt, Artificial Sequence
  SAMD9L targeting guide sequence portion
uuuccaucuaacauucucucu

SEQ ID NO: 19343 - RNA, 21 nt, Artificial Sequence
  SAMD9L targeting guide sequence portion
uuuccauucauuacccucuuu

SEQ ID NO: 19344 - RNA, 21 nt, Artificial Sequence
  SAMD9L targeting guide sequence portion
uuucuuagaucccaucucccc

SEQ ID NO: 19345 - RNA, 21 nt, Artificial Sequence
  SAMD9L targeting guide sequence portion
uuugucauucacaacugauuu

SEQ ID NO: 19346 - RNA, 21 nt, Artificial Sequence
  SAMD9L targeting guide sequence portion
uuugucuccugugaauacagc

SEQ ID NO: 19347 - RNA, 21 nt, Artificial Sequence
  SAMD9L targeting guide sequence portion
uuuguucccuuuacuucucaa

SEQ ID NO: 19348 - RNA, 21 nt, Artificial Sequence
  SAMD9L targeting guide sequence portion
uuuuauucaauauucaauuua

SEQ ID NO: 19349 - RNA, 21 nt, Artificial Sequence
  SAMD9L targeting guide sequence portion
uuuucagugucaaggaaugcc

SEQ ID NO: 19350 - RNA, 21 nt, Artificial Sequence
  SAMD9L targeting guide sequence portion
uuuuccauucauuacccucuu

SEQ ID NO: 19351 - RNA, 21 nt, Artificial Sequence
  SAMD9L targeting guide sequence portion
uuuugucuccugugaauacag

SEQ ID NO: 19352 - RNA, 21 nt, Artificial Sequence
  SAMD9L targeting guide sequence portion
uuuuuauucaauauucaauuu

SEQ ID NO: 19353 - RNA, 21 nt, Artificial Sequence
  SAMD9L targeting guide sequence portion
uuuuuccauucauuacccucu

SEQ ID NO: 19354 - RNA, 21 nt, Artificial Sequence
  SAMD9L targeting guide sequence portion
uuuuugucuccugugaauaca

SEQ ID NO: 19355 - RNA, 21 nt, Artificial Sequence
  SAMD9L targeting guide sequence portion
uuuuuuauucaauauucaauu

SEQ ID NO: 19356 - RNA, 21 nt, Artificial Sequence
  SAMD9L targeting guide sequence portion
uuuuuuccauucauuacccuc

SEQ ID NO: 19357 - RNA, 22 nt, Artificial Sequence
  SAMD9L targeting guide sequence portion
aaaaaauaagccaggggagaug

SEQ ID NO: 19358 - RNA, 22 nt, Artificial Sequence
  SAMD9L targeting guide sequence portion
aaaaauaagccaggggagaugg

SEQ ID NO: 19359 - RNA, 22 nt, Artificial Sequence
  SAMD9L targeting guide sequence portion
aaaaauggcuuaaaggaagaga

SEQ ID NO: 19360 - RNA, 22 nt, Artificial Sequence
  SAMD9L targeting guide sequence portion
aaaacuugagaacacauauuac

SEQ ID NO: 19361 - RNA, 22 nt, Artificial Sequence
  SAMD9L targeting guide sequence portion
aaaauaagccaggggagauggg

SEQ ID NO: 19362 - RNA, 22 nt, Artificial Sequence
  SAMD9L targeting guide sequence portion
aaaauggcuuaaaggaagagau

SEQ ID NO: 19363 - RNA, 22 nt, Artificial Sequence
  SAMD9L targeting guide sequence portion
aaacagguggagauaaggcugu

SEQ ID NO: 19364 - RNA, 22 nt, Artificial Sequence
  SAMD9L targeting guide sequence portion
aaacauaggcuaauauagauua

SEQ ID NO: 19365 - RNA, 22 nt, Artificial Sequence
  SAMD9L targeting guide sequence portion
aaacuugagaacacauauuacc

SEQ ID NO: 19366 - RNA, 22 nt, Artificial Sequence
  SAMD9L targeting guide sequence portion
aaagaggguaaugaauggaaaa

SEQ ID NO: 19367 - RNA, 22 nt, Artificial Sequence
  SAMD9L targeting guide sequence portion
aaaggaagagauucaccuguaa

SEQ ID NO: 19368 - RNA, 22 nt, Artificial Sequence
  SAMD9L targeting guide sequence portion
aaagggaacaaagaggguaaug

SEQ ID NO: 19369 - RNA, 22 nt, Artificial Sequence
  SAMD9L targeting guide sequence portion
aaagugaaacauaggcuaauau

SEQ ID NO: 19370 - RNA, 22 nt, Artificial Sequence
  SAMD9L targeting guide sequence portion
aaauaagccaggggagauggga

SEQ ID NO: 19371 - RNA, 22 nt, Artificial Sequence
  SAMD9L targeting guide sequence portion
aaauaaggcaaucucaacagag

SEQ ID NO: 19372 - RNA, 22 nt, Artificial Sequence
  SAMD9L targeting guide sequence portion
aaaucagaauagcaggagagag

SEQ ID NO: 19373 - RNA, 22 nt, Artificial Sequence
  SAMD9L targeting guide sequence portion
aaaucaguugugaaugacaaau

SEQ ID NO: 19374 - RNA, 22 nt, Artificial Sequence
  SAMD9L targeting guide sequence portion
aaauggcuuaaaggaagagauu

SEQ ID NO: 19375 - RNA, 22 nt, Artificial Sequence
  SAMD9L targeting guide sequence portion
aacaaagaggguaaugaaugga

SEQ ID NO: 19376 - RNA, 22 nt, Artificial Sequence
  SAMD9L targeting guide sequence portion
aacacauauuaccaugaggaag

SEQ ID NO: 19377 - RNA, 22 nt, Artificial Sequence
  SAMD9L targeting guide sequence portion
aacagagagaacagcauguaua

SEQ ID NO: 19378 - RNA, 22 nt, Artificial Sequence
  SAMD9L targeting guide sequence portion
aacagcauguauauagcacagg

SEQ ID NO: 19379 - RNA, 22 nt, Artificial Sequence
  SAMD9L targeting guide sequence portion
aacagccagaacagucucaagc

SEQ ID NO: 19380 - RNA, 22 nt, Artificial Sequence
  SAMD9L targeting guide sequence portion
aacagguggagauaaggcugua

SEQ ID NO: 19381 - RNA, 22 nt, Artificial Sequence
  SAMD9L targeting guide sequence portion
aacauaggcuaauauagauuaa

SEQ ID NO: 19382 - RNA, 22 nt, Artificial Sequence
  SAMD9L targeting guide sequence portion
aacauucucucuccugcuauuc

SEQ ID NO: 19383 - RNA, 22 nt, Artificial Sequence
  SAMD9L targeting guide sequence portion
aaccugugcuauauacaugcug

SEQ ID NO: 19384 - RNA, 22 nt, Artificial Sequence
  SAMD9L targeting guide sequence portion
aacuacgcauugccuauaaagu

SEQ ID NO: 19385 - RNA, 22 nt, Artificial Sequence
  SAMD9L targeting guide sequence portion
aacugauuucaagagucaccuu

SEQ ID NO: 19386 - RNA, 22 nt, Artificial Sequence
  SAMD9L targeting guide sequence portion
aacuugagaacacauauuacca

SEQ ID NO: 19387 - RNA, 22 nt, Artificial Sequence
  SAMD9L targeting guide sequence portion
aagaaacagguggagauaaggc

SEQ ID NO: 19388 - RNA, 22 nt, Artificial Sequence
  SAMD9L targeting guide sequence portion
aagaacuacgcauugccuauaa

SEQ ID NO: 19389 - RNA, 22 nt, Artificial Sequence
  SAMD9L targeting guide sequence portion
aagacuuccuggugaaggugac

SEQ ID NO: 19390 - RNA, 22 nt, Artificial Sequence
  SAMD9L targeting guide sequence portion
aagagauucaccuguaaauggg

SEQ ID NO: 19391 - RNA, 22 nt, Artificial Sequence
  SAMD9L targeting guide sequence portion
aagaggguaaugaauggaaaaa

SEQ ID NO: 19392 - RNA, 22 nt, Artificial Sequence
  SAMD9L targeting guide sequence portion
aagagucaccuucaccaggaag

SEQ ID NO: 19393 - RNA, 22 nt, Artificial Sequence
  SAMD9L targeting guide sequence portion
aagccaggggagaugggaucua

SEQ ID NO: 19394 - RNA, 22 nt, Artificial Sequence
  SAMD9L targeting guide sequence portion
aagccauuuuugucuccuguga

SEQ ID NO: 19395 - RNA, 22 nt, Artificial Sequence
  SAMD9L targeting guide sequence portion
aagcccucuaaucaggcaggaa

SEQ ID NO: 19396 - RNA, 22 nt, Artificial Sequence
  SAMD9L targeting guide sequence portion
aagcucauucucagaugcacaa

SEQ ID NO: 19397 - RNA, 22 nt, Artificial Sequence
  SAMD9L targeting guide sequence portion
aaggaagacuuccuggugaagg

SEQ ID NO: 19398 - RNA, 22 nt, Artificial Sequence
  SAMD9L targeting guide sequence portion
aaggaagagauucaccuguaaa

SEQ ID NO: 19399 - RNA, 22 nt, Artificial Sequence
  SAMD9L targeting guide sequence portion
aaggaaugccaucccagaagcu

SEQ ID NO: 19400 - RNA, 22 nt, Artificial Sequence
  SAMD9L targeting guide sequence portion
aaggcaaucucaacagagagaa

SEQ ID NO: 19401 - RNA, 22 nt, Artificial Sequence
  SAMD9L targeting guide sequence portion
aaggcuguauucacaggagaca

SEQ ID NO: 19402 - RNA, 22 nt, Artificial Sequence
  SAMD9L targeting guide sequence portion
aagggaacaaagaggguaauga

SEQ ID NO: 19403 - RNA, 22 nt, Artificial Sequence
  SAMD9L targeting guide sequence portion
aaggugacucuugaaaucaguu

SEQ ID NO: 19404 - RNA, 22 nt, Artificial Sequence
  SAMD9L targeting guide sequence portion
aaguaaagggaacaaagagggu

SEQ ID NO: 19405 - RNA, 22 nt, Artificial Sequence
  SAMD9L targeting guide sequence portion
aagucuuccuugaccaccauca

SEQ ID NO: 19406 - RNA, 22 nt, Artificial Sequence
  SAMD9L targeting guide sequence portion
aagugaaacauaggcuaauaua

SEQ ID NO: 19407 - RNA, 22 nt, Artificial Sequence
  SAMD9L targeting guide sequence portion
aaguuuucagugucaaggaaug

SEQ ID NO: 19408 - RNA, 22 nt, Artificial Sequence
  SAMD9L targeting guide sequence portion
aauaagccaggggagaugggau

SEQ ID NO: 19409 - RNA, 22 nt, Artificial Sequence
  SAMD9L targeting guide sequence portion
aauaaggcaaucucaacagaga

SEQ ID NO: 19410 - RNA, 22 nt, Artificial Sequence
  SAMD9L targeting guide sequence portion
aauacagccuuaucuccaccug

SEQ ID NO: 19411 - RNA, 22 nt, Artificial Sequence
  SAMD9L targeting guide sequence portion
aauagcaggagagagaauguua

SEQ ID NO: 19412 - RNA, 22 nt, Artificial Sequence
  SAMD9L targeting guide sequence portion
aauauagauuaaauugaauauu

SEQ ID NO: 19413 - RNA, 22 nt, Artificial Sequence
  SAMD9L targeting guide sequence portion
aauauguguucucaaguuuuca

SEQ ID NO: 19414 - RNA, 22 nt, Artificial Sequence
  SAMD9L targeting guide sequence portion
aauauucaauuuaaucuauauu

SEQ ID NO: 19415 - RNA, 22 nt, Artificial Sequence
  SAMD9L targeting guide sequence portion
aaucagaauagcaggagagaga

SEQ ID NO: 19416 - RNA, 22 nt, Artificial Sequence
  SAMD9L targeting guide sequence portion
aaucaggcaggaaugauggugg

SEQ ID NO: 19417 - RNA, 22 nt, Artificial Sequence
  SAMD9L targeting guide sequence portion
aaucaguugugaaugacaaauc

SEQ ID NO: 19418 - RNA, 22 nt, Artificial Sequence
  SAMD9L targeting guide sequence portion
aaucuauauuagccuauguuuc

SEQ ID NO: 19419 - RNA, 22 nt, Artificial Sequence
  SAMD9L targeting guide sequence portion
aaucucaacagagagaacagca

SEQ ID NO: 19420 - RNA, 22 nt, Artificial Sequence
  SAMD9L targeting guide sequence portion
aaucucuuccuuuaagccauuu

SEQ ID NO: 19421 - RNA, 22 nt, Artificial Sequence
  SAMD9L targeting guide sequence portion
aaugaauggaaaaaauaagcca

SEQ ID NO: 19422 - RNA, 22 nt, Artificial Sequence
  SAMD9L targeting guide sequence portion
aaugacaaaucagaauagcagg

SEQ ID NO: 19423 - RNA, 22 nt, Artificial Sequence
  SAMD9L targeting guide sequence portion
aaugagcuucugggauggcauu

SEQ ID NO: 19424 - RNA, 22 nt, Artificial Sequence
  SAMD9L targeting guide sequence portion
aaugaugguggucaaggaagac

SEQ ID NO: 19425 - RNA, 22 nt, Artificial Sequence
  SAMD9L targeting guide sequence portion
aaugccaucccagaagcucauu

SEQ ID NO: 19426 - RNA, 22 nt, Artificial Sequence
  SAMD9L targeting guide sequence portion
aaugcugcuugagacuguucug

SEQ ID NO: 19427 - RNA, 22 nt, Artificial Sequence
  SAMD9L targeting guide sequence portion
aauggaaaaaauaagccagggg

SEQ ID NO: 19428 - RNA, 22 nt, Artificial Sequence
  SAMD9L targeting guide sequence portion
aauggcuuaaaggaagagauuc

SEQ ID NO: 19429 - RNA, 22 nt, Artificial Sequence
  SAMD9L targeting guide sequence portion
aauguuagauggaaauaaggca

SEQ ID NO: 19430 - RNA, 22 nt, Artificial Sequence
  SAMD9L targeting guide sequence portion
aauuuaagaacuacgcauugcc

SEQ ID NO: 19431 - RNA, 22 nt, Artificial Sequence
  SAMD9L targeting guide sequence portion
aauuuaaucuauauuagccuau

SEQ ID NO: 19432 - RNA, 22 nt, Artificial Sequence
  SAMD9L targeting guide sequence portion
acaaaaauggcuuaaaggaaga

SEQ ID NO: 19433 - RNA, 22 nt, Artificial Sequence
  SAMD9L targeting guide sequence portion
acaaagaggguaaugaauggaa

SEQ ID NO: 19434 - RNA, 22 nt, Artificial Sequence
  SAMD9L targeting guide sequence portion
acaaaucagaauagcaggagag

SEQ ID NO: 19435 - RNA, 22 nt, Artificial Sequence
  SAMD9L targeting guide sequence portion
acaacagccagaacagucucaa

SEQ ID NO: 19436 - RNA, 22 nt, Artificial Sequence
  SAMD9L targeting guide sequence portion
acaacugauuucaagagucacc

SEQ ID NO: 19437 - RNA, 22 nt, Artificial Sequence
  SAMD9L targeting guide sequence portion
acacauauuaccaugaggaagc

SEQ ID NO: 19438 - RNA, 22 nt, Artificial Sequence
  SAMD9L targeting guide sequence portion
acacugaaaacuugagaacaca

SEQ ID NO: 19439 - RNA, 22 nt, Artificial Sequence
  SAMD9L targeting guide sequence portion
acagagagaacagcauguauau

SEQ ID NO: 19440 - RNA, 22 nt, Artificial Sequence
  SAMD9L targeting guide sequence portion
acagcauguauauagcacaggu

SEQ ID NO: 19441 - RNA, 22 nt, Artificial Sequence
  SAMD9L targeting guide sequence portion
acagccagaacagucucaagca

SEQ ID NO: 19442 - RNA, 22 nt, Artificial Sequence
  SAMD9L targeting guide sequence portion
acagccuuaucuccaccuguuu

SEQ ID NO: 19443 - RNA, 22 nt, Artificial Sequence
  SAMD9L targeting guide sequence portion
acaggagacaaaaauggcuuaa

SEQ ID NO: 19444 - RNA, 22 nt, Artificial Sequence
  SAMD9L targeting guide sequence portion
acaggugaaucucuuccuuuaa

SEQ ID NO: 19445 - RNA, 22 nt, Artificial Sequence
  SAMD9L targeting guide sequence portion
acagguggagauaaggcuguau

SEQ ID NO: 19446 - RNA, 22 nt, Artificial Sequence
  SAMD9L targeting guide sequence portion
acagguugagaaguaaagggaa

SEQ ID NO: 19447 - RNA, 22 nt, Artificial Sequence
  SAMD9L targeting guide sequence portion
acauaggcuaauauagauuaaa

SEQ ID NO: 19448 - RNA, 22 nt, Artificial Sequence
  SAMD9L targeting guide sequence portion
acauauuaccaugaggaagccc

SEQ ID NO: 19449 - RNA, 22 nt, Artificial Sequence
  SAMD9L targeting guide sequence portion
acaugcuguucucucuguugag

SEQ ID NO: 19450 - RNA, 22 nt, Artificial Sequence
  SAMD9L targeting guide sequence portion
acauucucucuccugcuauucu

SEQ ID NO: 19451 - RNA, 22 nt, Artificial Sequence
  SAMD9L targeting guide sequence portion
accaccaucauuccugccugau

SEQ ID NO: 19452 - RNA, 22 nt, Artificial Sequence
  SAMD9L targeting guide sequence portion
accaggaagucuuccuugacca

SEQ ID NO: 19453 - RNA, 22 nt, Artificial Sequence
  SAMD9L targeting guide sequence portion
accaucauuccugccugauuag

SEQ ID NO: 19454 - RNA, 22 nt, Artificial Sequence
  SAMD9L targeting guide sequence portion
accaugaggaagcccucuaauc

SEQ ID NO: 19455 - RNA, 22 nt, Artificial Sequence
  SAMD9L targeting guide sequence portion
acccucuuuguucccuuuacuu

SEQ ID NO: 19456 - RNA, 22 nt, Artificial Sequence
  SAMD9L targeting guide sequence portion
accugugcuauauacaugcugu

SEQ ID NO: 19457 - RNA, 22 nt, Artificial Sequence
  SAMD9L targeting guide sequence portion
accuguuucuuagaucccaucu

SEQ ID NO: 19458 - RNA, 22 nt, Artificial Sequence
  SAMD9L targeting guide sequence portion
accuucaccaggaagucuuccu

SEQ ID NO: 19459 - RNA, 22 nt, Artificial Sequence
  SAMD9L targeting guide sequence portion
acgcauugccuauaaagugaaa

SEQ ID NO: 19460 - RNA, 22 nt, Artificial Sequence
  SAMD9L targeting guide sequence portion
acuacgcauugccuauaaagug

SEQ ID NO: 19461 - RNA, 22 nt, Artificial Sequence
  SAMD9L targeting guide sequence portion
acucuugaaaucaguugugaau

SEQ ID NO: 19462 - RNA, 22 nt, Artificial Sequence
  SAMD9L targeting guide sequence portion
acugaaaacuugagaacacaua

SEQ ID NO: 19463 - RNA, 22 nt, Artificial Sequence
  SAMD9L targeting guide sequence portion
acugauuucaagagucaccuuc

SEQ ID NO: 19464 - RNA, 22 nt, Artificial Sequence
  SAMD9L targeting guide sequence portion
acuguucuggcuguugugcauc

SEQ ID NO: 19465 - RNA, 22 nt, Artificial Sequence
  SAMD9L targeting guide sequence portion
acuuccuggugaaggugacucu

SEQ ID NO: 19466 - RNA, 22 nt, Artificial Sequence
  SAMD9L targeting guide sequence portion
acuucucaaccugugcuauaua

SEQ ID NO: 19467 - RNA, 22 nt, Artificial Sequence
  SAMD9L targeting guide sequence portion
acuugagaacacauauuaccau

SEQ ID NO: 19468 - RNA, 22 nt, Artificial Sequence
  SAMD9L targeting guide sequence portion
acuuuauaggcaaugcguaguu

SEQ ID NO: 19469 - RNA, 22 nt, Artificial Sequence
  SAMD9L targeting guide sequence portion
agaaacagguggagauaaggcu

SEQ ID NO: 19470 - RNA, 22 nt, Artificial Sequence
  SAMD9L targeting guide sequence portion
agaacacauauuaccaugagga

SEQ ID NO: 19471 - RNA, 22 nt, Artificial Sequence
  SAMD9L targeting guide sequence portion
agaacagcauguauauagcaca

SEQ ID NO: 19472 - RNA, 22 nt, Artificial Sequence
  SAMD9L targeting guide sequence portion
agaacagucucaagcagcauuc

SEQ ID NO: 19473 - RNA, 22 nt, Artificial Sequence
  SAMD9L targeting guide sequence portion
agaacuacgcauugccuauaaa

SEQ ID NO: 19474 - RNA, 22 nt, Artificial Sequence
  SAMD9L targeting guide sequence portion
agaagcucauucucagaugcac

SEQ ID NO: 19475 - RNA, 22 nt, Artificial Sequence
  SAMD9L targeting guide sequence portion
agaaguaaagggaacaaagagg

SEQ ID NO: 19476 - RNA, 22 nt, Artificial Sequence
  SAMD9L targeting guide sequence portion
agaauagcaggagagagaaugu

SEQ ID NO: 19477 - RNA, 22 nt, Artificial Sequence
  SAMD9L targeting guide sequence portion
agaaugagcuucugggauggca

SEQ ID NO: 19478 - RNA, 22 nt, Artificial Sequence
  SAMD9L targeting guide sequence portion
agaaugcugcuugagacuguuc

SEQ ID NO: 19479 - RNA, 22 nt, Artificial Sequence
  SAMD9L targeting guide sequence portion
agaauguuagauggaaauaagg

SEQ ID NO: 19480 - RNA, 22 nt, Artificial Sequence
  SAMD9L targeting guide sequence portion
agacaaaaauggcuuaaaggaa

SEQ ID NO: 19481 - RNA, 22 nt, Artificial Sequence
  SAMD9L targeting guide sequence portion
agacuguucuggcuguugugca

SEQ ID NO: 19482 - RNA, 22 nt, Artificial Sequence
  SAMD9L targeting guide sequence portion
agacuuccuggugaaggugacu

SEQ ID NO: 19483 - RNA, 22 nt, Artificial Sequence
  SAMD9L targeting guide sequence portion
agagaacagcauguauauagca

SEQ ID NO: 19484 - RNA, 22 nt, Artificial Sequence
  SAMD9L targeting guide sequence portion
agagaauguuagauggaaauaa

SEQ ID NO: 19485 - RNA, 22 nt, Artificial Sequence
  SAMD9L targeting guide sequence portion
agagagaacagcauguauauag

SEQ ID NO: 19486 - RNA, 22 nt, Artificial Sequence
  SAMD9L targeting guide sequence portion
agagagaauguuagauggaaau

SEQ ID NO: 19487 - RNA, 22 nt, Artificial Sequence
  SAMD9L targeting guide sequence portion
agagauucaccuguaaauggga

SEQ ID NO: 19488 - RNA, 22 nt, Artificial Sequence
  SAMD9L targeting guide sequence portion
agagggcuuccucaugguaaua

SEQ ID NO: 19489 - RNA, 22 nt, Artificial Sequence
  SAMD9L targeting guide sequence portion
agaggguaaugaauggaaaaaa

SEQ ID NO: 19490 - RNA, 22 nt, Artificial Sequence
  SAMD9L targeting guide sequence portion
agagucaccuucaccaggaagu

SEQ ID NO: 19491 - RNA, 22 nt, Artificial Sequence
  SAMD9L targeting guide sequence portion
agauaaggcuguauucacagga

SEQ ID NO: 19492 - RNA, 22 nt, Artificial Sequence
  SAMD9L targeting guide sequence portion
agaucccaucuccccuggcuua

SEQ ID NO: 19493 - RNA, 22 nt, Artificial Sequence
  SAMD9L targeting guide sequence portion
agaugcacaacagccagaacag

SEQ ID NO: 19494 - RNA, 22 nt, Artificial Sequence
  SAMD9L targeting guide sequence portion
agauggaaauaaggcaaucuca

SEQ ID NO: 19495 - RNA, 22 nt, Artificial Sequence
  SAMD9L targeting guide sequence portion
agaugggaucuaagaaacaggu

SEQ ID NO: 19496 - RNA, 22 nt, Artificial Sequence
  SAMD9L targeting guide sequence portion
agauuaaauugaauauugaaua

SEQ ID NO: 19497 - RNA, 22 nt, Artificial Sequence
  SAMD9L targeting guide sequence portion
agauugccuuauuuccaucuaa

SEQ ID NO: 19498 - RNA, 22 nt, Artificial Sequence
  SAMD9L targeting guide sequence portion
agcacagguugagaaguaaagg

SEQ ID NO: 19499 - RNA, 22 nt, Artificial Sequence
  SAMD9L targeting guide sequence portion
agcaggagagagaauguuagau

SEQ ID NO: 19500 - RNA, 22 nt, Artificial Sequence
  SAMD9L targeting guide sequence portion
agcauguauauagcacagguug

SEQ ID NO: 19501 - RNA, 22 nt, Artificial Sequence
  SAMD9L targeting guide sequence portion
agccagaacagucucaagcagc

SEQ ID NO: 19502 - RNA, 22 nt, Artificial Sequence
  SAMD9L targeting guide sequence portion
agccaggggagaugggaucuaa

SEQ ID NO: 19503 - RNA, 22 nt, Artificial Sequence
  SAMD9L targeting guide sequence portion
agccauuuuugucuccugugaa

SEQ ID NO: 19504 - RNA, 22 nt, Artificial Sequence
  SAMD9L targeting guide sequence portion
agcccucuaaucaggcaggaau

SEQ ID NO: 19505 - RNA, 22 nt, Artificial Sequence
  SAMD9L targeting guide sequence portion
agccuauguuucacuuuauagg

SEQ ID NO: 19506 - RNA, 22 nt, Artificial Sequence
  SAMD9L targeting guide sequence portion
agccuuaucuccaccuguuucu

SEQ ID NO: 19507 - RNA, 22 nt, Artificial Sequence
  SAMD9L targeting guide sequence portion
agcucauucucagaugcacaac

SEQ ID NO: 19508 - RNA, 22 nt, Artificial Sequence
  SAMD9L targeting guide sequence portion
agcuucugggauggcauuccuu

SEQ ID NO: 19509 - RNA, 22 nt, Artificial Sequence
  SAMD9L targeting guide sequence portion
aggaagacuuccuggugaaggu

SEQ ID NO: 19510 - RNA, 22 nt, Artificial Sequence
  SAMD9L targeting guide sequence portion
aggaagagauucaccuguaaau

SEQ ID NO: 19511 - RNA, 22 nt, Artificial Sequence
  SAMD9L targeting guide sequence portion
aggaagcccucuaaucaggcag

SEQ ID NO: 19512 - RNA, 22 nt, Artificial Sequence
  SAMD9L targeting guide sequence portion
aggaagucuuccuugaccacca

SEQ ID NO: 19513 - RNA, 22 nt, Artificial Sequence
  SAMD9L targeting guide sequence portion
aggaaugaugguggucaaggaa

SEQ ID NO: 19514 - RNA, 22 nt, Artificial Sequence
  SAMD9L targeting guide sequence portion
aggaaugccaucccagaagcuc

SEQ ID NO: 19515 - RNA, 22 nt, Artificial Sequence
  SAMD9L targeting guide sequence portion
aggagacaaaaauggcuuaaag

SEQ ID NO: 19516 - RNA, 22 nt, Artificial Sequence
  SAMD9L targeting guide sequence portion
aggagagagaauguuagaugga

SEQ ID NO: 19517 - RNA, 22 nt, Artificial Sequence
  SAMD9L targeting guide sequence portion
aggcaaucucaacagagagaac

SEQ ID NO: 19518 - RNA, 22 nt, Artificial Sequence
  SAMD9L targeting guide sequence portion
aggcaggaaugaugguggucaa

SEQ ID NO: 19519 - RNA, 22 nt, Artificial Sequence
  SAMD9L targeting guide sequence portion
aggcuaauauagauuaaauuga

SEQ ID NO: 19520 - RNA, 22 nt, Artificial Sequence
  SAMD9L targeting guide sequence portion
aggcuguauucacaggagacaa

SEQ ID NO: 19521 - RNA, 22 nt, Artificial Sequence
  SAMD9L targeting guide sequence portion
agggaacaaagaggguaaugaa

SEQ ID NO: 19522 - RNA, 22 nt, Artificial Sequence
  SAMD9L targeting guide sequence portion
agggcuuccucaugguaauaug

SEQ ID NO: 19523 - RNA, 22 nt, Artificial Sequence
  SAMD9L targeting guide sequence portion
aggggagaugggaucuaagaaa

SEQ ID NO: 19524 - RNA, 22 nt, Artificial Sequence
  SAMD9L targeting guide sequence portion
aggguaaugaauggaaaaaaua

SEQ ID NO: 19525 - RNA, 22 nt, Artificial Sequence
  SAMD9L targeting guide sequence portion
aggugaaucucuuccuuuaagc

SEQ ID NO: 19526 - RNA, 22 nt, Artificial Sequence
  SAMD9L targeting guide sequence portion
aggugacucuugaaaucaguug

SEQ ID NO: 19527 - RNA, 22 nt, Artificial Sequence
  SAMD9L targeting guide sequence portion
agguggagauaaggcuguauuc

SEQ ID NO: 19528 - RNA, 22 nt, Artificial Sequence
  SAMD9L targeting guide sequence portion
agguugagaaguaaagggaaca

SEQ ID NO: 19529 - RNA, 22 nt, Artificial Sequence
  SAMD9L targeting guide sequence portion
aguaaagggaacaaagagggua

SEQ ID NO: 19530 - RNA, 22 nt, Artificial Sequence
  SAMD9L targeting guide sequence portion
agucaccuucaccaggaagucu

SEQ ID NO: 19531 - RNA, 22 nt, Artificial Sequence
  SAMD9L targeting guide sequence portion
agucuuccuugaccaccaucau

SEQ ID NO: 19532 - RNA, 22 nt, Artificial Sequence
  SAMD9L targeting guide sequence portion
agugaaacauaggcuaauauag

SEQ ID NO: 19533 - RNA, 22 nt, Artificial Sequence
  SAMD9L targeting guide sequence portion
agugucaaggaaugccauccca

SEQ ID NO: 19534 - RNA, 22 nt, Artificial Sequence
  SAMD9L targeting guide sequence portion
aguugugaaugacaaaucagaa

SEQ ID NO: 19535 - RNA, 22 nt, Artificial Sequence
  SAMD9L targeting guide sequence portion
aguuuucagugucaaggaaugc

SEQ ID NO: 19536 - RNA, 22 nt, Artificial Sequence
  SAMD9L targeting guide sequence portion
auaaagugaaacauaggcuaau

SEQ ID NO: 19537 - RNA, 22 nt, Artificial Sequence
  SAMD9L targeting guide sequence portion
auaagccaggggagaugggauc

SEQ ID NO: 19538 - RNA, 22 nt, Artificial Sequence
  SAMD9L targeting guide sequence portion
auaaggcaaucucaacagagag

SEQ ID NO: 19539 - RNA, 22 nt, Artificial Sequence
  SAMD9L targeting guide sequence portion
auaaggcuguauucacaggaga

SEQ ID NO: 19540 - RNA, 22 nt, Artificial Sequence
  SAMD9L targeting guide sequence portion
auacagccuuaucuccaccugu

SEQ ID NO: 19541 - RNA, 22 nt, Artificial Sequence
  SAMD9L targeting guide sequence portion
auacaugcuguucucucuguug

SEQ ID NO: 19542 - RNA, 22 nt, Artificial Sequence
  SAMD9L targeting guide sequence portion
auagauuaaauugaauauugaa

SEQ ID NO: 19543 - RNA, 22 nt, Artificial Sequence
  SAMD9L targeting guide sequence portion
auagcacagguugagaaguaaa

SEQ ID NO: 19544 - RNA, 22 nt, Artificial Sequence
  SAMD9L targeting guide sequence portion
auagcaggagagagaauguuag

SEQ ID NO: 19545 - RNA, 22 nt, Artificial Sequence
  SAMD9L targeting guide sequence portion
auaggcaaugcguaguucuuaa

SEQ ID NO: 19546 - RNA, 22 nt, Artificial Sequence
  SAMD9L targeting guide sequence portion
auaggcuaauauagauuaaauu

SEQ ID NO: 19547 - RNA, 22 nt, Artificial Sequence
  SAMD9L targeting guide sequence portion
auauacaugcuguucucucugu

SEQ ID NO: 19548 - RNA, 22 nt, Artificial Sequence
  SAMD9L targeting guide sequence portion
auauagauuaaauugaauauug

SEQ ID NO: 19549 - RNA, 22 nt, Artificial Sequence
  SAMD9L targeting guide sequence portion
auauagcacagguugagaagua

SEQ ID NO: 19550 - RNA, 22 nt, Artificial Sequence
  SAMD9L targeting guide sequence portion
auauguguucucaaguuuucag

SEQ ID NO: 19551 - RNA, 22 nt, Artificial Sequence
  SAMD9L targeting guide sequence portion
auauuaccaugaggaagcccuc

SEQ ID NO: 19552 - RNA, 22 nt, Artificial Sequence
  SAMD9L targeting guide sequence portion
auauuagccuauguuucacuuu

SEQ ID NO: 19553 - RNA, 22 nt, Artificial Sequence
  SAMD9L targeting guide sequence portion
auauucaauuuaaucuauauua

SEQ ID NO: 19554 - RNA, 22 nt, Artificial Sequence
  SAMD9L targeting guide sequence portion
auauuuuuuauucaauauucaa

SEQ ID NO: 19555 - RNA, 22 nt, Artificial Sequence
  SAMD9L targeting guide sequence portion
aucagaauagcaggagagagaa

SEQ ID NO: 19556 - RNA, 22 nt, Artificial Sequence
  SAMD9L targeting guide sequence portion
aucaggcaggaaugaugguggu

SEQ ID NO: 19557 - RNA, 22 nt, Artificial Sequence
  SAMD9L targeting guide sequence portion
aucaguugugaaugacaaauca

SEQ ID NO: 19558 - RNA, 22 nt, Artificial Sequence
  SAMD9L targeting guide sequence portion
aucauuccugccugauuagagg

SEQ ID NO: 19559 - RNA, 22 nt, Artificial Sequence
  SAMD9L targeting guide sequence portion
aucccagaagcucauucucaga

SEQ ID NO: 19560 - RNA, 22 nt, Artificial Sequence
  SAMD9L targeting guide sequence portion
aucccaucuccccuggcuuauu

SEQ ID NO: 19561 - RNA, 22 nt, Artificial Sequence
  SAMD9L targeting guide sequence portion
aucuaacauucucucuccugcu

SEQ ID NO: 19562 - RNA, 22 nt, Artificial Sequence
  SAMD9L targeting guide sequence portion
aucuaagaaacagguggagaua

SEQ ID NO: 19563 - RNA, 22 nt, Artificial Sequence
  SAMD9L targeting guide sequence portion
aucuauauuagccuauguuuca

SEQ ID NO: 19564 - RNA, 22 nt, Artificial Sequence
  SAMD9L targeting guide sequence portion
aucucaacagagagaacagcau

SEQ ID NO: 19565 - RNA, 22 nt, Artificial Sequence
  SAMD9L targeting guide sequence portion
aucuccaccuguuucuuagauc

SEQ ID NO: 19566 - RNA, 22 nt, Artificial Sequence
  SAMD9L targeting guide sequence portion
aucuccccuggcuuauuuuuuc

SEQ ID NO: 19567 - RNA, 22 nt, Artificial Sequence
  SAMD9L targeting guide sequence portion
aucucuuccuuuaagccauuuu

SEQ ID NO: 19568 - RNA, 22 nt, Artificial Sequence
  SAMD9L targeting guide sequence portion
aucugagaaugagcuucuggga

SEQ ID NO: 19569 - RNA, 22 nt, Artificial Sequence
  SAMD9L targeting guide sequence portion
augaauggaaaaaauaagccag

SEQ ID NO: 19570 - RNA, 22 nt, Artificial Sequence
  SAMD9L targeting guide sequence portion
augacaaaucagaauagcagga

SEQ ID NO: 19571 - RNA, 22 nt, Artificial Sequence
  SAMD9L targeting guide sequence portion
augagcuucugggauggcauuc

SEQ ID NO: 19572 - RNA, 22 nt, Artificial Sequence
  SAMD9L targeting guide sequence portion
augaggaagcccucuaaucagg

SEQ ID NO: 19573 - RNA, 22 nt, Artificial Sequence
  SAMD9L targeting guide sequence portion
augaugguggucaaggaagacu

SEQ ID NO: 19574 - RNA, 22 nt, Artificial Sequence
  SAMD9L targeting guide sequence portion
augcacaacagccagaacaguc

SEQ ID NO: 19575 - RNA, 22 nt, Artificial Sequence
  SAMD9L targeting guide sequence portion
augccaucccagaagcucauuc

SEQ ID NO: 19576 - RNA, 22 nt, Artificial Sequence
  SAMD9L targeting guide sequence portion
augcugcuugagacuguucugg

SEQ ID NO: 19577 - RNA, 22 nt, Artificial Sequence
  SAMD9L targeting guide sequence portion
augcuguucucucuguugagau

SEQ ID NO: 19578 - RNA, 22 nt, Artificial Sequence
  SAMD9L targeting guide sequence portion
auggaaaaaauaagccagggga

SEQ ID NO: 19579 - RNA, 22 nt, Artificial Sequence
  SAMD9L targeting guide sequence portion
auggaaauaaggcaaucucaac

SEQ ID NO: 19580 - RNA, 22 nt, Artificial Sequence
  SAMD9L targeting guide sequence portion
auggcauuccuugacacugaaa

SEQ ID NO: 19581 - RNA, 22 nt, Artificial Sequence
  SAMD9L targeting guide sequence portion
auggcuuaaaggaagagauuca

SEQ ID NO: 19582 - RNA, 22 nt, Artificial Sequence
  SAMD9L targeting guide sequence portion
augggaucuaagaaacaggugg

SEQ ID NO: 19583 - RNA, 22 nt, Artificial Sequence
  SAMD9L targeting guide sequence portion
augguaauauguguucucaagu

SEQ ID NO: 19584 - RNA, 22 nt, Artificial Sequence
  SAMD9L targeting guide sequence portion
augguggucaaggaagacuucc

SEQ ID NO: 19585 - RNA, 22 nt, Artificial Sequence
  SAMD9L targeting guide sequence portion
auguauauagcacagguugaga

SEQ ID NO: 19586 - RNA, 22 nt, Artificial Sequence
  SAMD9L targeting guide sequence portion
auguguucucaaguuuucagug

SEQ ID NO: 19587 - RNA, 22 nt, Artificial Sequence
  SAMD9L targeting guide sequence portion
auguuagauggaaauaaggcaa

SEQ ID NO: 19588 - RNA, 22 nt, Artificial Sequence
  SAMD9L targeting guide sequence portion
auguuucacuuuauaggcaaug

SEQ ID NO: 19589 - RNA, 22 nt, Artificial Sequence
  SAMD9L targeting guide sequence portion
auuaaauugaauauugaauaaa

SEQ ID NO: 19590 - RNA, 22 nt, Artificial Sequence
  SAMD9L targeting guide sequence portion
auuaccaugaggaagcccucua

SEQ ID NO: 19591 - RNA, 22 nt, Artificial Sequence
  SAMD9L targeting guide sequence portion
auuacccucuuuguucccuuua

SEQ ID NO: 19592 - RNA, 22 nt, Artificial Sequence
  SAMD9L targeting guide sequence portion
auuagagggcuuccucauggua

SEQ ID NO: 19593 - RNA, 22 nt, Artificial Sequence
  SAMD9L targeting guide sequence portion
auuagccuauguuucacuuuau

SEQ ID NO: 19594 - RNA, 22 nt, Artificial Sequence
  SAMD9L targeting guide sequence portion
auucaauauucaauuuaaucua

SEQ ID NO: 19595 - RNA, 22 nt, Artificial Sequence
  SAMD9L targeting guide sequence portion
auucaauuuaaucuauauuagc

SEQ ID NO: 19596 - RNA, 22 nt, Artificial Sequence
  SAMD9L targeting guide sequence portion
auucacaacugauuucaagagu

SEQ ID NO: 19597 - RNA, 22 nt, Artificial Sequence
  SAMD9L targeting guide sequence portion
auucacaggagacaaaaauggc

SEQ ID NO: 19598 - RNA, 22 nt, Artificial Sequence
  SAMD9L targeting guide sequence portion
auucauuacccucuuuguuccc

SEQ ID NO: 19599 - RNA, 22 nt, Artificial Sequence
  SAMD9L targeting guide sequence portion
auuccugccugauuagagggcu

SEQ ID NO: 19600 - RNA, 22 nt, Artificial Sequence
  SAMD9L targeting guide sequence portion
auuccuugacacugaaaacuug

SEQ ID NO: 19601 - RNA, 22 nt, Artificial Sequence
  SAMD9L targeting guide sequence portion
auucucagaugcacaacagcca

SEQ ID NO: 19602 - RNA, 22 nt, Artificial Sequence
  SAMD9L targeting guide sequence portion
auucucucuccugcuauucuga

SEQ ID NO: 19603 - RNA, 22 nt, Artificial Sequence
  SAMD9L targeting guide sequence portion
auucugauuugucauucacaac

SEQ ID NO: 19604 - RNA, 22 nt, Artificial Sequence
  SAMD9L targeting guide sequence portion
auugccuauaaagugaaacaua

SEQ ID NO: 19605 - RNA, 22 nt, Artificial Sequence
  SAMD9L targeting guide sequence portion
auugccuuauuuccaucuaaca

SEQ ID NO: 19606 - RNA, 22 nt, Artificial Sequence
  SAMD9L targeting guide sequence portion
auuuaagaacuacgcauugccu

SEQ ID NO: 19607 - RNA, 22 nt, Artificial Sequence
  SAMD9L targeting guide sequence portion
auuuaaucuauauuagccuaug

SEQ ID NO: 19608 - RNA, 22 nt, Artificial Sequence
  SAMD9L targeting guide sequence portion
auuuacaggugaaucucuuccu

SEQ ID NO: 19609 - RNA, 22 nt, Artificial Sequence
  SAMD9L targeting guide sequence portion
auuucaagagucaccuucacca

SEQ ID NO: 19610 - RNA, 22 nt, Artificial Sequence
  SAMD9L targeting guide sequence portion
auuuccaucuaacauucucucu

SEQ ID NO: 19611 - RNA, 22 nt, Artificial Sequence
  SAMD9L targeting guide sequence portion
auuugucauucacaacugauuu

SEQ ID NO: 19612 - RNA, 22 nt, Artificial Sequence
  SAMD9L targeting guide sequence portion
auuuuugucuccugugaauaca

SEQ ID NO: 19613 - RNA, 22 nt, Artificial Sequence
  SAMD9L targeting guide sequence portion
auuuuuuauucaauauucaauu

SEQ ID NO: 19614 - RNA, 22 nt, Artificial Sequence
  SAMD9L targeting guide sequence portion
auuuuuuccauucauuacccuc

SEQ ID NO: 19615 - RNA, 22 nt, Artificial Sequence
  SAMD9L targeting guide sequence portion
caaaaauggcuuaaaggaagag

SEQ ID NO: 19616 - RNA, 22 nt, Artificial Sequence
  SAMD9L targeting guide sequence portion
caaagaggguaaugaauggaaa

SEQ ID NO: 19617 - RNA, 22 nt, Artificial Sequence
  SAMD9L targeting guide sequence portion
caaaucagaauagcaggagaga

SEQ ID NO: 19618 - RNA, 22 nt, Artificial Sequence
  SAMD9L targeting guide sequence portion
caacagagagaacagcauguau

SEQ ID NO: 19619 - RNA, 22 nt, Artificial Sequence
  SAMD9L targeting guide sequence portion
caacagccagaacagucucaag

SEQ ID NO: 19620 - RNA, 22 nt, Artificial Sequence
  SAMD9L targeting guide sequence portion
caaccugugcuauauacaugcu

SEQ ID NO: 19621 - RNA, 22 nt, Artificial Sequence
  SAMD9L targeting guide sequence portion
caacugauuucaagagucaccu

SEQ ID NO: 19622 - RNA, 22 nt, Artificial Sequence
  SAMD9L targeting guide sequence portion
caagagucaccuucaccaggaa

SEQ ID NO: 19623 - RNA, 22 nt, Artificial Sequence
  SAMD9L targeting guide sequence portion
caaggaagacuuccuggugaag

SEQ ID NO: 19624 - RNA, 22 nt, Artificial Sequence
  SAMD9L targeting guide sequence portion
caaggaaugccaucccagaagc

SEQ ID NO: 19625 - RNA, 22 nt, Artificial Sequence
  SAMD9L targeting guide sequence portion
caaguuuucagugucaaggaau

SEQ ID NO: 19626 - RNA, 22 nt, Artificial Sequence
  SAMD9L targeting guide sequence portion
caauauucaauuuaaucuauau

SEQ ID NO: 19627 - RNA, 22 nt, Artificial Sequence
  SAMD9L targeting guide sequence portion
caaucucaacagagagaacagc

SEQ ID NO: 19628 - RNA, 22 nt, Artificial Sequence
  SAMD9L targeting guide sequence portion
caauuuaaucuauauuagccua

SEQ ID NO: 19629 - RNA, 22 nt, Artificial Sequence
  SAMD9L targeting guide sequence portion
cacaacagccagaacagucuca

SEQ ID NO: 19630 - RNA, 22 nt, Artificial Sequence
  SAMD9L targeting guide sequence portion
cacaacugauuucaagagucac

SEQ ID NO: 19631 - RNA, 22 nt, Artificial Sequence
  SAMD9L targeting guide sequence portion
cacaggagacaaaaauggcuua

SEQ ID NO: 19632 - RNA, 22 nt, Artificial Sequence
  SAMD9L targeting guide sequence portion
cacagguugagaaguaaaggga

SEQ ID NO: 19633 - RNA, 22 nt, Artificial Sequence
  SAMD9L targeting guide sequence portion
cacauauuaccaugaggaagcc

SEQ ID NO: 19634 - RNA, 22 nt, Artificial Sequence
  SAMD9L targeting guide sequence portion
caccaggaagucuuccuugacc

SEQ ID NO: 19635 - RNA, 22 nt, Artificial Sequence
  SAMD9L targeting guide sequence portion
caccaucauuccugccugauua

SEQ ID NO: 19636 - RNA, 22 nt, Artificial Sequence
  SAMD9L targeting guide sequence portion
caccuguuucuuagaucccauc

SEQ ID NO: 19637 - RNA, 22 nt, Artificial Sequence
  SAMD9L targeting guide sequence portion
caccuucaccaggaagucuucc

SEQ ID NO: 19638 - RNA, 22 nt, Artificial Sequence
  SAMD9L targeting guide sequence portion
cacugaaaacuugagaacacau

SEQ ID NO: 19639 - RNA, 22 nt, Artificial Sequence
  SAMD9L targeting guide sequence portion
cacuuuauaggcaaugcguagu

SEQ ID NO: 19640 - RNA, 22 nt, Artificial Sequence
  SAMD9L targeting guide sequence portion
cagaacagucucaagcagcauu

SEQ ID NO: 19641 - RNA, 22 nt, Artificial Sequence
  SAMD9L targeting guide sequence portion
cagaagcucauucucagaugca

SEQ ID NO: 19642 - RNA, 22 nt, Artificial Sequence
  SAMD9L targeting guide sequence portion
cagaauagcaggagagagaaug

SEQ ID NO: 19643 - RNA, 22 nt, Artificial Sequence
  SAMD9L targeting guide sequence portion
cagagagaacagcauguauaua

SEQ ID NO: 19644 - RNA, 22 nt, Artificial Sequence
  SAMD9L targeting guide sequence portion
cagaugcacaacagccagaaca

SEQ ID NO: 19645 - RNA, 22 nt, Artificial Sequence
  SAMD9L targeting guide sequence portion
cagcauguauauagcacagguu

SEQ ID NO: 19646 - RNA, 22 nt, Artificial Sequence
  SAMD9L targeting guide sequence portion
cagccagaacagucucaagcag

SEQ ID NO: 19647 - RNA, 22 nt, Artificial Sequence
  SAMD9L targeting guide sequence portion
cagccuuaucuccaccuguuuc

SEQ ID NO: 19648 - RNA, 22 nt, Artificial Sequence
  SAMD9L targeting guide sequence portion
caggaagucuuccuugaccacc

SEQ ID NO: 19649 - RNA, 22 nt, Artificial Sequence
  SAMD9L targeting guide sequence portion
caggaaugaugguggucaagga

SEQ ID NO: 19650 - RNA, 22 nt, Artificial Sequence
  SAMD9L targeting guide sequence portion
caggagacaaaaauggcuuaaa

SEQ ID NO: 19651 - RNA, 22 nt, Artificial Sequence
  SAMD9L targeting guide sequence portion
caggagagagaauguuagaugg

SEQ ID NO: 19652 - RNA, 22 nt, Artificial Sequence
  SAMD9L targeting guide sequence portion
caggcaggaaugauggugguca

SEQ ID NO: 19653 - RNA, 22 nt, Artificial Sequence
  SAMD9L targeting guide sequence portion
caggggagaugggaucuaagaa

SEQ ID NO: 19654 - RNA, 22 nt, Artificial Sequence
  SAMD9L targeting guide sequence portion
caggugaaucucuuccuuuaag

SEQ ID NO: 19655 - RNA, 22 nt, Artificial Sequence
  SAMD9L targeting guide sequence portion
cagguggagauaaggcuguauu

SEQ ID NO: 19656 - RNA, 22 nt, Artificial Sequence
  SAMD9L targeting guide sequence portion
cagguugagaaguaaagggaac

SEQ ID NO: 19657 - RNA, 22 nt, Artificial Sequence
  SAMD9L targeting guide sequence portion
cagugucaaggaaugccauccc

SEQ ID NO: 19658 - RNA, 22 nt, Artificial Sequence
  SAMD9L targeting guide sequence portion
caguugugaaugacaaaucaga

SEQ ID NO: 19659 - RNA, 22 nt, Artificial Sequence
  SAMD9L targeting guide sequence portion
cauaggcuaauauagauuaaau

SEQ ID NO: 19660 - RNA, 22 nt, Artificial Sequence
  SAMD9L targeting guide sequence portion
cauauuaccaugaggaagcccu

SEQ ID NO: 19661 - RNA, 22 nt, Artificial Sequence
  SAMD9L targeting guide sequence portion
caucauuccugccugauuagag

SEQ ID NO: 19662 - RNA, 22 nt, Artificial Sequence
  SAMD9L targeting guide sequence portion
caucccagaagcucauucucag

SEQ ID NO: 19663 - RNA, 22 nt, Artificial Sequence
  SAMD9L targeting guide sequence portion
caucuaacauucucucuccugc

SEQ ID NO: 19664 - RNA, 22 nt, Artificial Sequence
  SAMD9L targeting guide sequence portion
caucuccccuggcuuauuuuuu

SEQ ID NO: 19665 - RNA, 22 nt, Artificial Sequence
  SAMD9L targeting guide sequence portion
caucugagaaugagcuucuggg

SEQ ID NO: 19666 - RNA, 22 nt, Artificial Sequence
  SAMD9L targeting guide sequence portion
caugaggaagcccucuaaucag

SEQ ID NO: 19667 - RNA, 22 nt, Artificial Sequence
  SAMD9L targeting guide sequence portion
caugcuguucucucuguugaga

SEQ ID NO: 19668 - RNA, 22 nt, Artificial Sequence
  SAMD9L targeting guide sequence portion
caugguaauauguguucucaag

SEQ ID NO: 19669 - RNA, 22 nt, Artificial Sequence
  SAMD9L targeting guide sequence portion
cauguauauagcacagguugag

SEQ ID NO: 19670 - RNA, 22 nt, Artificial Sequence
  SAMD9L targeting guide sequence portion
cauuacccucuuuguucccuuu

SEQ ID NO: 19671 - RNA, 22 nt, Artificial Sequence
  SAMD9L targeting guide sequence portion
cauucacaacugauuucaagag

SEQ ID NO: 19672 - RNA, 22 nt, Artificial Sequence
  SAMD9L targeting guide sequence portion
cauucauuacccucuuuguucc

SEQ ID NO: 19673 - RNA, 22 nt, Artificial Sequence
  SAMD9L targeting guide sequence portion
cauuccugccugauuagagggc

SEQ ID NO: 19674 - RNA, 22 nt, Artificial Sequence
  SAMD9L targeting guide sequence portion
cauuccuugacacugaaaacuu

SEQ ID NO: 19675 - RNA, 22 nt, Artificial Sequence
  SAMD9L targeting guide sequence portion
cauucucagaugcacaacagcc

SEQ ID NO: 19676 - RNA, 22 nt, Artificial Sequence
  SAMD9L targeting guide sequence portion
cauucucucuccugcuauucug

SEQ ID NO: 19677 - RNA, 22 nt, Artificial Sequence
  SAMD9L targeting guide sequence portion
cauugccuauaaagugaaacau

SEQ ID NO: 19678 - RNA, 22 nt, Artificial Sequence
  SAMD9L targeting guide sequence portion
cauuuacaggugaaucucuucc

SEQ ID NO: 19679 - RNA, 22 nt, Artificial Sequence
  SAMD9L targeting guide sequence portion
cauuuuugucuccugugaauac

SEQ ID NO: 19680 - RNA, 22 nt, Artificial Sequence
  SAMD9L targeting guide sequence portion
ccaccaucauuccugccugauu

SEQ ID NO: 19681 - RNA, 22 nt, Artificial Sequence
  SAMD9L targeting guide sequence portion
ccaccuguuucuuagaucccau

SEQ ID NO: 19682 - RNA, 22 nt, Artificial Sequence
  SAMD9L targeting guide sequence portion
ccagaacagucucaagcagcau

SEQ ID NO: 19683 - RNA, 22 nt, Artificial Sequence
  SAMD9L targeting guide sequence portion
ccagaagcucauucucagaugc

SEQ ID NO: 19684 - RNA, 22 nt, Artificial Sequence
  SAMD9L targeting guide sequence portion
ccaggaagucuuccuugaccac

SEQ ID NO: 19685 - RNA, 22 nt, Artificial Sequence
  SAMD9L targeting guide sequence portion
ccaggggagaugggaucuaaga

SEQ ID NO: 19686 - RNA, 22 nt, Artificial Sequence
  SAMD9L targeting guide sequence portion
ccaucauuccugccugauuaga

SEQ ID NO: 19687 - RNA, 22 nt, Artificial Sequence
  SAMD9L targeting guide sequence portion
ccaucccagaagcucauucuca

SEQ ID NO: 19688 - RNA, 22 nt, Artificial Sequence
  SAMD9L targeting guide sequence portion
ccaucuaacauucucucuccug

SEQ ID NO: 19689 - RNA, 22 nt, Artificial Sequence
  SAMD9L targeting guide sequence portion
ccaucuccccuggcuuauuuuu

SEQ ID NO: 19690 - RNA, 22 nt, Artificial Sequence
  SAMD9L targeting guide sequence portion
ccaugaggaagcccucuaauca

SEQ ID NO: 19691 - RNA, 22 nt, Artificial Sequence
  SAMD9L targeting guide sequence portion
ccauucauuacccucuuuguuc

SEQ ID NO: 19692 - RNA, 22 nt, Artificial Sequence
  SAMD9L targeting guide sequence portion
ccauuuacaggugaaucucuuc

SEQ ID NO: 19693 - RNA, 22 nt, Artificial Sequence
  SAMD9L targeting guide sequence portion
ccauuuuugucuccugugaaua

SEQ ID NO: 19694 - RNA, 22 nt, Artificial Sequence
  SAMD9L targeting guide sequence portion
cccagaagcucauucucagaug

SEQ ID NO: 19695 - RNA, 22 nt, Artificial Sequence
  SAMD9L targeting guide sequence portion
cccaucuccccuggcuuauuuu

SEQ ID NO: 19696 - RNA, 22 nt, Artificial Sequence
  SAMD9L targeting guide sequence portion
cccauuuacaggugaaucucuu

SEQ ID NO: 19697 - RNA, 22 nt, Artificial Sequence
  SAMD9L targeting guide sequence portion
ccccuggcuuauuuuuuccauu

SEQ ID NO: 19698 - RNA, 22 nt, Artificial Sequence
  SAMD9L targeting guide sequence portion
cccucuaaucaggcaggaauga

SEQ ID NO: 19699 - RNA, 22 nt, Artificial Sequence
  SAMD9L targeting guide sequence portion
cccucuuuguucccuuuacuuc

SEQ ID NO: 19700 - RNA, 22 nt, Artificial Sequence
  SAMD9L targeting guide sequence portion
cccuggcuuauuuuuuccauuc

SEQ ID NO: 19701 - RNA, 22 nt, Artificial Sequence
  SAMD9L targeting guide sequence portion
cccuuuacuucucaaccugugc

SEQ ID NO: 19702 - RNA, 22 nt, Artificial Sequence
  SAMD9L targeting guide sequence portion
ccuauaaagugaaacauaggcu

SEQ ID NO: 19703 - RNA, 22 nt, Artificial Sequence
  SAMD9L targeting guide sequence portion
ccuauguuucacuuuauaggca

SEQ ID NO: 19704 - RNA, 22 nt, Artificial Sequence
  SAMD9L targeting guide sequence portion
ccucaugguaauauguguucuc

SEQ ID NO: 19705 - RNA, 22 nt, Artificial Sequence
  SAMD9L targeting guide sequence portion
ccucuaaucaggcaggaaugau

SEQ ID NO: 19706 - RNA, 22 nt, Artificial Sequence
  SAMD9L targeting guide sequence portion
ccucuuuguucccuuuacuucu

SEQ ID NO: 19707 - RNA, 22 nt, Artificial Sequence
  SAMD9L targeting guide sequence portion
ccugauuagagggcuuccucau

SEQ ID NO: 19708 - RNA, 22 nt, Artificial Sequence
  SAMD9L targeting guide sequence portion
ccugccugauuagagggcuucc

SEQ ID NO: 19709 - RNA, 22 nt, Artificial Sequence
  SAMD9L targeting guide sequence portion
ccugcuauucugauuugucauu

SEQ ID NO: 19710 - RNA, 22 nt, Artificial Sequence
  SAMD9L targeting guide sequence portion
ccuggcuuauuuuuuccauuca

SEQ ID NO: 19711 - RNA, 22 nt, Artificial Sequence
  SAMD9L targeting guide sequence portion
ccuggugaaggugacucuugaa

SEQ ID NO: 19712 - RNA, 22 nt, Artificial Sequence
  SAMD9L targeting guide sequence portion
ccugugaauacagccuuaucuc

SEQ ID NO: 19713 - RNA, 22 nt, Artificial Sequence
  SAMD9L targeting guide sequence portion
ccugugcuauauacaugcuguu

SEQ ID NO: 19714 - RNA, 22 nt, Artificial Sequence
  SAMD9L targeting guide sequence portion
ccuguuucuuagaucccaucuc

SEQ ID NO: 19715 - RNA, 22 nt, Artificial Sequence
  SAMD9L targeting guide sequence portion
ccuuaucuccaccuguuucuua

SEQ ID NO: 19716 - RNA, 22 nt, Artificial Sequence
  SAMD9L targeting guide sequence portion
ccuuauuuccaucuaacauucu

SEQ ID NO: 19717 - RNA, 22 nt, Artificial Sequence
  SAMD9L targeting guide sequence portion
ccuucaccaggaagucuuccuu

SEQ ID NO: 19718 - RNA, 22 nt, Artificial Sequence
  SAMD9L targeting guide sequence portion
ccuugacacugaaaacuugaga

SEQ ID NO: 19719 - RNA, 22 nt, Artificial Sequence
  SAMD9L targeting guide sequence portion
ccuugaccaccaucauuccugc

SEQ ID NO: 19720 - RNA, 22 nt, Artificial Sequence
  SAMD9L targeting guide sequence portion
ccuuuaagccauuuuugucucc

SEQ ID NO: 19721 - RNA, 22 nt, Artificial Sequence
  SAMD9L targeting guide sequence portion
ccuuuacuucucaaccugugcu

SEQ ID NO: 19722 - RNA, 22 nt, Artificial Sequence
  SAMD9L targeting guide sequence portion
cgcauugccuauaaagugaaac

SEQ ID NO: 19723 - RNA, 22 nt, Artificial Sequence
  SAMD9L targeting guide sequence portion
cuaacauucucucuccugcuau

SEQ ID NO: 19724 - RNA, 22 nt, Artificial Sequence
  SAMD9L targeting guide sequence portion
cuaagaaacagguggagauaag

SEQ ID NO: 19725 - RNA, 22 nt, Artificial Sequence
  SAMD9L targeting guide sequence portion
cuaauauagauuaaauugaaua

SEQ ID NO: 19726 - RNA, 22 nt, Artificial Sequence
  SAMD9L targeting guide sequence portion
cuaaucaggcaggaaugauggu

SEQ ID NO: 19727 - RNA, 22 nt, Artificial Sequence
  SAMD9L targeting guide sequence portion
cuacgcauugccuauaaaguga

SEQ ID NO: 19728 - RNA, 22 nt, Artificial Sequence
  SAMD9L targeting guide sequence portion
cuagaaugcugcuugagacugu

SEQ ID NO: 19729 - RNA, 22 nt, Artificial Sequence
  SAMD9L targeting guide sequence portion
cuauaaagugaaacauaggcua

SEQ ID NO: 19730 - RNA, 22 nt, Artificial Sequence
  SAMD9L targeting guide sequence portion
cuauauacaugcuguucucucu

SEQ ID NO: 19731 - RNA, 22 nt, Artificial Sequence
  SAMD9L targeting guide sequence portion
cuauauuagccuauguuucacu

SEQ ID NO: 19732 - RNA, 22 nt, Artificial Sequence
  SAMD9L targeting guide sequence portion
cuauguuucacuuuauaggcaa

SEQ ID NO: 19733 - RNA, 22 nt, Artificial Sequence
  SAMD9L targeting guide sequence portion
cuauucugauuugucauucaca

SEQ ID NO: 19734 - RNA, 22 nt, Artificial Sequence
  SAMD9L targeting guide sequence portion
cucaacagagagaacagcaugu

SEQ ID NO: 19735 - RNA, 22 nt, Artificial Sequence
  SAMD9L targeting guide sequence portion
cucaaccugugcuauauacaug

SEQ ID NO: 19736 - RNA, 22 nt, Artificial Sequence
  SAMD9L targeting guide sequence portion
cucaaguuuucagugucaagga

SEQ ID NO: 19737 - RNA, 22 nt, Artificial Sequence
  SAMD9L targeting guide sequence portion
cucagaugcacaacagccagaa

SEQ ID NO: 19738 - RNA, 22 nt, Artificial Sequence
  SAMD9L targeting guide sequence portion
cucaugguaauauguguucuca

SEQ ID NO: 19739 - RNA, 22 nt, Artificial Sequence
  SAMD9L targeting guide sequence portion
cucauucucagaugcacaacag

SEQ ID NO: 19740 - RNA, 22 nt, Artificial Sequence
  SAMD9L targeting guide sequence portion
cuccaccuguuucuuagauccc

SEQ ID NO: 19741 - RNA, 22 nt, Artificial Sequence
  SAMD9L targeting guide sequence portion
cuccccuggcuuauuuuuucca

SEQ ID NO: 19742 - RNA, 22 nt, Artificial Sequence
  SAMD9L targeting guide sequence portion
cuccugcuauucugauuuguca

SEQ ID NO: 19743 - RNA, 22 nt, Artificial Sequence
  SAMD9L targeting guide sequence portion
cuccugugaauacagccuuauc

SEQ ID NO: 19744 - RNA, 22 nt, Artificial Sequence
  SAMD9L targeting guide sequence portion
cucuaaucaggcaggaaugaug

SEQ ID NO: 19745 - RNA, 22 nt, Artificial Sequence
  SAMD9L targeting guide sequence portion
cucuagaaugcugcuugagacu

SEQ ID NO: 19746 - RNA, 22 nt, Artificial Sequence
  SAMD9L targeting guide sequence portion
cucuccugcuauucugauuugu

SEQ ID NO: 19747 - RNA, 22 nt, Artificial Sequence
  SAMD9L targeting guide sequence portion
cucucuccugcuauucugauuu

SEQ ID NO: 19748 - RNA, 22 nt, Artificial Sequence
  SAMD9L targeting guide sequence portion
cucucuguugagauugccuuau

SEQ ID NO: 19749 - RNA, 22 nt, Artificial Sequence
  SAMD9L targeting guide sequence portion
cucuguugagauugccuuauuu

SEQ ID NO: 19750 - RNA, 22 nt, Artificial Sequence
  SAMD9L targeting guide sequence portion
cucuuccuuuaagccauuuuug

SEQ ID NO: 19751 - RNA, 22 nt, Artificial Sequence
  SAMD9L targeting guide sequence portion
cucuugaaaucaguugugaaug

SEQ ID NO: 19752 - RNA, 22 nt, Artificial Sequence
  SAMD9L targeting guide sequence portion
cucuuguucccauuuacaggug

SEQ ID NO: 19753 - RNA, 22 nt, Artificial Sequence
  SAMD9L targeting guide sequence portion
cucuuuguucccuuuacuucuc

SEQ ID NO: 19754 - RNA, 22 nt, Artificial Sequence
  SAMD9L targeting guide sequence portion
cugaaaacuugagaacacauau

SEQ ID NO: 19755 - RNA, 22 nt, Artificial Sequence
  SAMD9L targeting guide sequence portion
cugagaaugagcuucugggaug

SEQ ID NO: 19756 - RNA, 22 nt, Artificial Sequence
  SAMD9L targeting guide sequence portion
cugauuagagggcuuccucaug

SEQ ID NO: 19757 - RNA, 22 nt, Artificial Sequence
  SAMD9L targeting guide sequence portion
cugauuucaagagucaccuuca

SEQ ID NO: 19758 - RNA, 22 nt, Artificial Sequence
  SAMD9L targeting guide sequence portion
cugauuugucauucacaacuga

SEQ ID NO: 19759 - RNA, 22 nt, Artificial Sequence
  SAMD9L targeting guide sequence portion
cugccugauuagagggcuuccu

SEQ ID NO: 19760 - RNA, 22 nt, Artificial Sequence
  SAMD9L targeting guide sequence portion
cugcuauucugauuugucauuc

SEQ ID NO: 19761 - RNA, 22 nt, Artificial Sequence
  SAMD9L targeting guide sequence portion
cugcuugagacuguucuggcug

SEQ ID NO: 19762 - RNA, 22 nt, Artificial Sequence
  SAMD9L targeting guide sequence portion
cuggcuguugugcaucugagaa

SEQ ID NO: 19763 - RNA, 22 nt, Artificial Sequence
  SAMD9L targeting guide sequence portion
cuggcuuauuuuuuccauucau

SEQ ID NO: 19764 - RNA, 22 nt, Artificial Sequence
  SAMD9L targeting guide sequence portion
cugggauggcauuccuugacac

SEQ ID NO: 19765 - RNA, 22 nt, Artificial Sequence
  SAMD9L targeting guide sequence portion
cuggugaaggugacucuugaaa

SEQ ID NO: 19766 - RNA, 22 nt, Artificial Sequence
  SAMD9L targeting guide sequence portion
cuguauucacaggagacaaaaa

SEQ ID NO: 19767 - RNA, 22 nt, Artificial Sequence
  SAMD9L targeting guide sequence portion
cugugaauacagccuuaucucc

SEQ ID NO: 19768 - RNA, 22 nt, Artificial Sequence
  SAMD9L targeting guide sequence portion
cugugcuauauacaugcuguuc

SEQ ID NO: 19769 - RNA, 22 nt, Artificial Sequence
  SAMD9L targeting guide sequence portion
cuguucucucuguugagauugc

SEQ ID NO: 19770 - RNA, 22 nt, Artificial Sequence
  SAMD9L targeting guide sequence portion
cuguucuggcuguugugcaucu

SEQ ID NO: 19771 - RNA, 22 nt, Artificial Sequence
  SAMD9L targeting guide sequence portion
cuguugagauugccuuauuucc

SEQ ID NO: 19772 - RNA, 22 nt, Artificial Sequence
  SAMD9L targeting guide sequence portion
cuguugugcaucugagaaugag

SEQ ID NO: 19773 - RNA, 22 nt, Artificial Sequence
  SAMD9L targeting guide sequence portion
cuguuucuuagaucccaucucc

SEQ ID NO: 19774 - RNA, 22 nt, Artificial Sequence
  SAMD9L targeting guide sequence portion
cuuaaaggaagagauucaccug

SEQ ID NO: 19775 - RNA, 22 nt, Artificial Sequence
  SAMD9L targeting guide sequence portion
cuuagaucccaucuccccuggc

SEQ ID NO: 19776 - RNA, 22 nt, Artificial Sequence
  SAMD9L targeting guide sequence portion
cuuaucuccaccuguuucuuag

SEQ ID NO: 19777 - RNA, 22 nt, Artificial Sequence
  SAMD9L targeting guide sequence portion
cuuauuuccaucuaacauucuc

SEQ ID NO: 19778 - RNA, 22 nt, Artificial Sequence
  SAMD9L targeting guide sequence portion
cuuauuuuuuccauucauuacc

SEQ ID NO: 19779 - RNA, 22 nt, Artificial Sequence
  SAMD9L targeting guide sequence portion
cuucaccaggaagucuuccuug

SEQ ID NO: 19780 - RNA, 22 nt, Artificial Sequence
  SAMD9L targeting guide sequence portion
cuuccucaugguaauauguguu

SEQ ID NO: 19781 - RNA, 22 nt, Artificial Sequence
  SAMD9L targeting guide sequence portion
cuuccuggugaaggugacucuu

SEQ ID NO: 19782 - RNA, 22 nt, Artificial Sequence
  SAMD9L targeting guide sequence portion
cuuccuugaccaccaucauucc

SEQ ID NO: 19783 - RNA, 22 nt, Artificial Sequence
  SAMD9L targeting guide sequence portion
cuuccuuuaagccauuuuuguc

SEQ ID NO: 19784 - RNA, 22 nt, Artificial Sequence
  SAMD9L targeting guide sequence portion
cuucucaaccugugcuauauac

SEQ ID NO: 19785 - RNA, 22 nt, Artificial Sequence
  SAMD9L targeting guide sequence portion
cuucugggauggcauuccuuga

SEQ ID NO: 19786 - RNA, 22 nt, Artificial Sequence
  SAMD9L targeting guide sequence portion
cuugaaaucaguugugaaugac

SEQ ID NO: 19787 - RNA, 22 nt, Artificial Sequence
  SAMD9L targeting guide sequence portion
cuugacacugaaaacuugagaa

SEQ ID NO: 19788 - RNA, 22 nt, Artificial Sequence
  SAMD9L targeting guide sequence portion
cuugaccaccaucauuccugcc

SEQ ID NO: 19789 - RNA, 22 nt, Artificial Sequence
  SAMD9L targeting guide sequence portion
cuugagaacacauauuaccaug

SEQ ID NO: 19790 - RNA, 22 nt, Artificial Sequence
  SAMD9L targeting guide sequence portion
cuugagacuguucuggcuguug

SEQ ID NO: 19791 - RNA, 22 nt, Artificial Sequence
  SAMD9L targeting guide sequence portion
cuuguucccauuuacaggugaa

SEQ ID NO: 19792 - RNA, 22 nt, Artificial Sequence
  SAMD9L targeting guide sequence portion
cuuuaagccauuuuugucuccu

SEQ ID NO: 19793 - RNA, 22 nt, Artificial Sequence
  SAMD9L targeting guide sequence portion
cuuuacuucucaaccugugcua

SEQ ID NO: 19794 - RNA, 22 nt, Artificial Sequence
  SAMD9L targeting guide sequence portion
cuuuauaggcaaugcguaguuc

SEQ ID NO: 19795 - RNA, 22 nt, Artificial Sequence
  SAMD9L targeting guide sequence portion
cuuuguucccuuuacuucucaa

SEQ ID NO: 19796 - RNA, 22 nt, Artificial Sequence
  SAMD9L targeting guide sequence portion
gaaaaaauaagccaggggagau

SEQ ID NO: 19797 - RNA, 22 nt, Artificial Sequence
  SAMD9L targeting guide sequence portion
gaaaacuugagaacacauauua

SEQ ID NO: 19798 - RNA, 22 nt, Artificial Sequence
  SAMD9L targeting guide sequence portion
gaaacagguggagauaaggcug

SEQ ID NO: 19799 - RNA, 22 nt, Artificial Sequence
  SAMD9L targeting guide sequence portion
gaaacauaggcuaauauagauu

SEQ ID NO: 19800 - RNA, 22 nt, Artificial Sequence
  SAMD9L targeting guide sequence portion
gaaauaaggcaaucucaacaga

SEQ ID NO: 19801 - RNA, 22 nt, Artificial Sequence
  SAMD9L targeting guide sequence portion
gaaaucaguugugaaugacaaa

SEQ ID NO: 19802 - RNA, 22 nt, Artificial Sequence
  SAMD9L targeting guide sequence portion
gaacaaagaggguaaugaaugg

SEQ ID NO: 19803 - RNA, 22 nt, Artificial Sequence
  SAMD9L targeting guide sequence portion
gaacacauauuaccaugaggaa

SEQ ID NO: 19804 - RNA, 22 nt, Artificial Sequence
  SAMD9L targeting guide sequence portion
gaacagcauguauauagcacag

SEQ ID NO: 19805 - RNA, 22 nt, Artificial Sequence
  SAMD9L targeting guide sequence portion
gaacuacgcauugccuauaaag

SEQ ID NO: 19806 - RNA, 22 nt, Artificial Sequence
  SAMD9L targeting guide sequence portion
gaagacuuccuggugaagguga

SEQ ID NO: 19807 - RNA, 22 nt, Artificial Sequence
  SAMD9L targeting guide sequence portion
gaagagauucaccuguaaaugg

SEQ ID NO: 19808 - RNA, 22 nt, Artificial Sequence
  SAMD9L targeting guide sequence portion
gaagcccucuaaucaggcagga

SEQ ID NO: 19809 - RNA, 22 nt, Artificial Sequence
  SAMD9L targeting guide sequence portion
gaagcucauucucagaugcaca

SEQ ID NO: 19810 - RNA, 22 nt, Artificial Sequence
  SAMD9L targeting guide sequence portion
gaaggugacucuugaaaucagu

SEQ ID NO: 19811 - RNA, 22 nt, Artificial Sequence
  SAMD9L targeting guide sequence portion
gaaguaaagggaacaaagaggg

SEQ ID NO: 19812 - RNA, 22 nt, Artificial Sequence
  SAMD9L targeting guide sequence portion
gaagucuuccuugaccaccauc

SEQ ID NO: 19813 - RNA, 22 nt, Artificial Sequence
  SAMD9L targeting guide sequence portion
gaauacagccuuaucuccaccu

SEQ ID NO: 19814 - RNA, 22 nt, Artificial Sequence
  SAMD9L targeting guide sequence portion
gaauagcaggagagagaauguu

SEQ ID NO: 19815 - RNA, 22 nt, Artificial Sequence
  SAMD9L targeting guide sequence portion
gaaucucuuccuuuaagccauu

SEQ ID NO: 19816 - RNA, 22 nt, Artificial Sequence
  SAMD9L targeting guide sequence portion
gaaugacaaaucagaauagcag

SEQ ID NO: 19817 - RNA, 22 nt, Artificial Sequence
  SAMD9L targeting guide sequence portion
gaaugagcuucugggauggcau

SEQ ID NO: 19818 - RNA, 22 nt, Artificial Sequence
  SAMD9L targeting guide sequence portion
gaaugaugguggucaaggaaga

SEQ ID NO: 19819 - RNA, 22 nt, Artificial Sequence
  SAMD9L targeting guide sequence portion
gaaugccaucccagaagcucau

SEQ ID NO: 19820 - RNA, 22 nt, Artificial Sequence
  SAMD9L targeting guide sequence portion
gaaugcugcuugagacuguucu

SEQ ID NO: 19821 - RNA, 22 nt, Artificial Sequence
  SAMD9L targeting guide sequence portion
gaauggaaaaaauaagccaggg

SEQ ID NO: 19822 - RNA, 22 nt, Artificial Sequence
  SAMD9L targeting guide sequence portion
gaauguuagauggaaauaaggc

SEQ ID NO: 19823 - RNA, 22 nt, Artificial Sequence
  SAMD9L targeting guide sequence portion
gaauuuaagaacuacgcauugc

SEQ ID NO: 19824 - RNA, 22 nt, Artificial Sequence
  SAMD9L targeting guide sequence portion
gacaaaaauggcuuaaaggaag

SEQ ID NO: 19825 - RNA, 22 nt, Artificial Sequence
  SAMD9L targeting guide sequence portion
gacaaaucagaauagcaggaga

SEQ ID NO: 19826 - RNA, 22 nt, Artificial Sequence
  SAMD9L targeting guide sequence portion
gacacugaaaacuugagaacac

SEQ ID NO: 19827 - RNA, 22 nt, Artificial Sequence
  SAMD9L targeting guide sequence portion
gaccaccaucauuccugccuga

SEQ ID NO: 19828 - RNA, 22 nt, Artificial Sequence
  SAMD9L targeting guide sequence portion
gacucuugaaaucaguugugaa

SEQ ID NO: 19829 - RNA, 22 nt, Artificial Sequence
  SAMD9L targeting guide sequence portion
gacuguucuggcuguugugcau

SEQ ID NO: 19830 - RNA, 22 nt, Artificial Sequence
  SAMD9L targeting guide sequence portion
gacuuccuggugaaggugacuc

SEQ ID NO: 19831 - RNA, 22 nt, Artificial Sequence
  SAMD9L targeting guide sequence portion
gagaacacauauuaccaugagg

SEQ ID NO: 19832 - RNA, 22 nt, Artificial Sequence
  SAMD9L targeting guide sequence portion
gagaacagcauguauauagcac

SEQ ID NO: 19833 - RNA, 22 nt, Artificial Sequence
  SAMD9L targeting guide sequence portion
gagaaguaaagggaacaaagag

SEQ ID NO: 19834 - RNA, 22 nt, Artificial Sequence
  SAMD9L targeting guide sequence portion
gagaaugagcuucugggauggc

SEQ ID NO: 19835 - RNA, 22 nt, Artificial Sequence
  SAMD9L targeting guide sequence portion
gagaauguuagauggaaauaag

SEQ ID NO: 19836 - RNA, 22 nt, Artificial Sequence
  SAMD9L targeting guide sequence portion
gagacaaaaauggcuuaaagga

SEQ ID NO: 19837 - RNA, 22 nt, Artificial Sequence
  SAMD9L targeting guide sequence portion
gagacuguucuggcuguugugc

SEQ ID NO: 19838 - RNA, 22 nt, Artificial Sequence
  SAMD9L targeting guide sequence portion
gagagaacagcauguauauagc

SEQ ID NO: 19839 - RNA, 22 nt, Artificial Sequence
  SAMD9L targeting guide sequence portion
gagagaauguuagauggaaaua

SEQ ID NO: 19840 - RNA, 22 nt, Artificial Sequence
  SAMD9L targeting guide sequence portion
gagagagaauguuagauggaaa

SEQ ID NO: 19841 - RNA, 22 nt, Artificial Sequence
  SAMD9L targeting guide sequence portion
gagauaaggcuguauucacagg

SEQ ID NO: 19842 - RNA, 22 nt, Artificial Sequence
  SAMD9L targeting guide sequence portion
gagaugggaucuaagaaacagg

SEQ ID NO: 19843 - RNA, 22 nt, Artificial Sequence
  SAMD9L targeting guide sequence portion
gagauucaccuguaaaugggaa

SEQ ID NO: 19844 - RNA, 22 nt, Artificial Sequence
  SAMD9L targeting guide sequence portion
gagauugccuuauuuccaucua

SEQ ID NO: 19845 - RNA, 22 nt, Artificial Sequence
  SAMD9L targeting guide sequence portion
gagcuucugggauggcauuccu

SEQ ID NO: 19846 - RNA, 22 nt, Artificial Sequence
  SAMD9L targeting guide sequence portion
gaggaagcccucuaaucaggca

SEQ ID NO: 19847 - RNA, 22 nt, Artificial Sequence
  SAMD9L targeting guide sequence portion
gagggcuuccucaugguaauau

SEQ ID NO: 19848 - RNA, 22 nt, Artificial Sequence
  SAMD9L targeting guide sequence portion
gaggguaaugaauggaaaaaau

SEQ ID NO: 19849 - RNA, 22 nt, Artificial Sequence
  SAMD9L targeting guide sequence portion
gagucaccuucaccaggaaguc

SEQ ID NO: 19850 - RNA, 22 nt, Artificial Sequence
  SAMD9L targeting guide sequence portion
gauaaggcuguauucacaggag

SEQ ID NO: 19851 - RNA, 22 nt, Artificial Sequence
  SAMD9L targeting guide sequence portion
gaucccaucuccccuggcuuau

SEQ ID NO: 19852 - RNA, 22 nt, Artificial Sequence
  SAMD9L targeting guide sequence portion
gaucuaagaaacagguggagau

SEQ ID NO: 19853 - RNA, 22 nt, Artificial Sequence
  SAMD9L targeting guide sequence portion
gaugcacaacagccagaacagu

SEQ ID NO: 19854 - RNA, 22 nt, Artificial Sequence
  SAMD9L targeting guide sequence portion
gauggaaauaaggcaaucucaa

SEQ ID NO: 19855 - RNA, 22 nt, Artificial Sequence
  SAMD9L targeting guide sequence portion
gauggcauuccuugacacugaa

SEQ ID NO: 19856 - RNA, 22 nt, Artificial Sequence
  SAMD9L targeting guide sequence portion
gaugggaucuaagaaacaggug

SEQ ID NO: 19857 - RNA, 22 nt, Artificial Sequence
  SAMD9L targeting guide sequence portion
gaugguggucaaggaagacuuc

SEQ ID NO: 19858 - RNA, 22 nt, Artificial Sequence
  SAMD9L targeting guide sequence portion
gauuaaauugaauauugaauaa

SEQ ID NO: 19859 - RNA, 22 nt, Artificial Sequence
  SAMD9L targeting guide sequence portion
gauuagagggcuuccucauggu

SEQ ID NO: 19860 - RNA, 22 nt, Artificial Sequence
  SAMD9L targeting guide sequence portion
gauugccuuauuuccaucuaac

SEQ ID NO: 19861 - RNA, 22 nt, Artificial Sequence
  SAMD9L targeting guide sequence portion
gauuucaagagucaccuucacc

SEQ ID NO: 19862 - RNA, 22 nt, Artificial Sequence
  SAMD9L targeting guide sequence portion
gauuugucauucacaacugauu

SEQ ID NO: 19863 - RNA, 22 nt, Artificial Sequence
  SAMD9L targeting guide sequence portion
gcaaucucaacagagagaacag

SEQ ID NO: 19864 - RNA, 22 nt, Artificial Sequence
  SAMD9L targeting guide sequence portion
gcacaacagccagaacagucuc

SEQ ID NO: 19865 - RNA, 22 nt, Artificial Sequence
  SAMD9L targeting guide sequence portion
gcacagguugagaaguaaaggg

SEQ ID NO: 19866 - RNA, 22 nt, Artificial Sequence
  SAMD9L targeting guide sequence portion
gcaggaaugaugguggucaagg

SEQ ID NO: 19867 - RNA, 22 nt, Artificial Sequence
  SAMD9L targeting guide sequence portion
gcaggagagagaauguuagaug

SEQ ID NO: 19868 - RNA, 22 nt, Artificial Sequence
  SAMD9L targeting guide sequence portion
gcaucugagaaugagcuucugg

SEQ ID NO: 19869 - RNA, 22 nt, Artificial Sequence
  SAMD9L targeting guide sequence portion
gcauguauauagcacagguuga

SEQ ID NO: 19870 - RNA, 22 nt, Artificial Sequence
  SAMD9L targeting guide sequence portion
gcauuccuugacacugaaaacu

SEQ ID NO: 19871 - RNA, 22 nt, Artificial Sequence
  SAMD9L targeting guide sequence portion
gcauugccuauaaagugaaaca

SEQ ID NO: 19872 - RNA, 22 nt, Artificial Sequence
  SAMD9L targeting guide sequence portion
gccagaacagucucaagcagca

SEQ ID NO: 19873 - RNA, 22 nt, Artificial Sequence
  SAMD9L targeting guide sequence portion
gccaggggagaugggaucuaag

SEQ ID NO: 19874 - RNA, 22 nt, Artificial Sequence
  SAMD9L targeting guide sequence portion
gccaucccagaagcucauucuc

SEQ ID NO: 19875 - RNA, 22 nt, Artificial Sequence
  SAMD9L targeting guide sequence portion
gccauuuuugucuccugugaau

SEQ ID NO: 19876 - RNA, 22 nt, Artificial Sequence
  SAMD9L targeting guide sequence portion
gcccucuaaucaggcaggaaug

SEQ ID NO: 19877 - RNA, 22 nt, Artificial Sequence
  SAMD9L targeting guide sequence portion
gccuauaaagugaaacauaggc

SEQ ID NO: 19878 - RNA, 22 nt, Artificial Sequence
  SAMD9L targeting guide sequence portion
gccuauguuucacuuuauaggc

SEQ ID NO: 19879 - RNA, 22 nt, Artificial Sequence
  SAMD9L targeting guide sequence portion
gccugauuagagggcuuccuca

SEQ ID NO: 19880 - RNA, 22 nt, Artificial Sequence
  SAMD9L targeting guide sequence portion
gccuuaucuccaccuguuucuu

SEQ ID NO: 19881 - RNA, 22 nt, Artificial Sequence
  SAMD9L targeting guide sequence portion
gccuuauuuccaucuaacauuc

SEQ ID NO: 19882 - RNA, 22 nt, Artificial Sequence
  SAMD9L targeting guide sequence portion
gcuaauauagauuaaauugaau

SEQ ID NO: 19883 - RNA, 22 nt, Artificial Sequence
  SAMD9L targeting guide sequence portion
gcuauauacaugcuguucucuc

SEQ ID NO: 19884 - RNA, 22 nt, Artificial Sequence
  SAMD9L targeting guide sequence portion
gcuauucugauuugucauucac

SEQ ID NO: 19885 - RNA, 22 nt, Artificial Sequence
  SAMD9L targeting guide sequence portion
gcucauucucagaugcacaaca

SEQ ID NO: 19886 - RNA, 22 nt, Artificial Sequence
  SAMD9L targeting guide sequence portion
gcucuagaaugcugcuugagac

SEQ ID NO: 19887 - RNA, 22 nt, Artificial Sequence
  SAMD9L targeting guide sequence portion
gcugcuugagacuguucuggcu

SEQ ID NO: 19888 - RNA, 22 nt, Artificial Sequence
  SAMD9L targeting guide sequence portion
gcuguauucacaggagacaaaa

SEQ ID NO: 19889 - RNA, 22 nt, Artificial Sequence
  SAMD9L targeting guide sequence portion
gcuguucucucuguugagauug

SEQ ID NO: 19890 - RNA, 22 nt, Artificial Sequence
  SAMD9L targeting guide sequence portion
gcuguugugcaucugagaauga

SEQ ID NO: 19891 - RNA, 22 nt, Artificial Sequence
  SAMD9L targeting guide sequence portion
gcuuaaaggaagagauucaccu

SEQ ID NO: 19892 - RNA, 22 nt, Artificial Sequence
  SAMD9L targeting guide sequence portion
gcuuauuuuuuccauucauuac

SEQ ID NO: 19893 - RNA, 22 nt, Artificial Sequence
  SAMD9L targeting guide sequence portion
gcuuccucaugguaauaugugu

SEQ ID NO: 19894 - RNA, 22 nt, Artificial Sequence
  SAMD9L targeting guide sequence portion
gcuucugggauggcauuccuug

SEQ ID NO: 19895 - RNA, 22 nt, Artificial Sequence
  SAMD9L targeting guide sequence portion
gcuugagacuguucuggcuguu

SEQ ID NO: 19896 - RNA, 22 nt, Artificial Sequence
  SAMD9L targeting guide sequence portion
ggaaaaaauaagccaggggaga

SEQ ID NO: 19897 - RNA, 22 nt, Artificial Sequence
  SAMD9L targeting guide sequence portion
ggaaauaaggcaaucucaacag

SEQ ID NO: 19898 - RNA, 22 nt, Artificial Sequence
  SAMD9L targeting guide sequence portion
ggaacaaagaggguaaugaaug

SEQ ID NO: 19899 - RNA, 22 nt, Artificial Sequence
  SAMD9L targeting guide sequence portion
ggaagacuuccuggugaaggug

SEQ ID NO: 19900 - RNA, 22 nt, Artificial Sequence
  SAMD9L targeting guide sequence portion
ggaagagauucaccuguaaaug

SEQ ID NO: 19901 - RNA, 22 nt, Artificial Sequence
  SAMD9L targeting guide sequence portion
ggaagcccucuaaucaggcagg

SEQ ID NO: 19902 - RNA, 22 nt, Artificial Sequence
  SAMD9L targeting guide sequence portion
ggaagucuuccuugaccaccau

SEQ ID NO: 19903 - RNA, 22 nt, Artificial Sequence
  SAMD9L targeting guide sequence portion
ggaaugaugguggucaaggaag

SEQ ID NO: 19904 - RNA, 22 nt, Artificial Sequence
  SAMD9L targeting guide sequence portion
ggaaugccaucccagaagcuca

SEQ ID NO: 19905 - RNA, 22 nt, Artificial Sequence
  SAMD9L targeting guide sequence portion
ggaauuuaagaacuacgcauug

SEQ ID NO: 19906 - RNA, 22 nt, Artificial Sequence
  SAMD9L targeting guide sequence portion
ggagacaaaaauggcuuaaagg

SEQ ID NO: 19907 - RNA, 22 nt, Artificial Sequence
  SAMD9L targeting guide sequence portion
ggagagagaauguuagauggaa

SEQ ID NO: 19908 - RNA, 22 nt, Artificial Sequence
  SAMD9L targeting guide sequence portion
ggagauaaggcuguauucacag

SEQ ID NO: 19909 - RNA, 22 nt, Artificial Sequence
  SAMD9L targeting guide sequence portion
ggagaugggaucuaagaaacag

SEQ ID NO: 19910 - RNA, 22 nt, Artificial Sequence
  SAMD9L targeting guide sequence portion
ggaucuaagaaacagguggaga

SEQ ID NO: 19911 - RNA, 22 nt, Artificial Sequence
  SAMD9L targeting guide sequence portion
ggauggcauuccuugacacuga

SEQ ID NO: 19912 - RNA, 22 nt, Artificial Sequence
  SAMD9L targeting guide sequence portion
ggcaaucucaacagagagaaca

SEQ ID NO: 19913 - RNA, 22 nt, Artificial Sequence
  SAMD9L targeting guide sequence portion
ggcaggaaugaugguggucaag

SEQ ID NO: 19914 - RNA, 22 nt, Artificial Sequence
  SAMD9L targeting guide sequence portion
ggcauuccuugacacugaaaac

SEQ ID NO: 19915 - RNA, 22 nt, Artificial Sequence
  SAMD9L targeting guide sequence portion
ggcuaauauagauuaaauugaa

SEQ ID NO: 19916 - RNA, 22 nt, Artificial Sequence
  SAMD9L targeting guide sequence portion
ggcuguauucacaggagacaaa

SEQ ID NO: 19917 - RNA, 22 nt, Artificial Sequence
  SAMD9L targeting guide sequence portion
ggcuguugugcaucugagaaug

SEQ ID NO: 19918 - RNA, 22 nt, Artificial Sequence
  SAMD9L targeting guide sequence portion
ggcuuaaaggaagagauucacc

SEQ ID NO: 19919 - RNA, 22 nt, Artificial Sequence
  SAMD9L targeting guide sequence portion
ggcuuauuuuuuccauucauua

SEQ ID NO: 19920 - RNA, 22 nt, Artificial Sequence
  SAMD9L targeting guide sequence portion
ggcuuccucaugguaauaugug

SEQ ID NO: 19921 - RNA, 22 nt, Artificial Sequence
  SAMD9L targeting guide sequence portion
gggaacaaagaggguaaugaau

SEQ ID NO: 19922 - RNA, 22 nt, Artificial Sequence
  SAMD9L targeting guide sequence portion
gggagaugggaucuaagaaaca

SEQ ID NO: 19923 - RNA, 22 nt, Artificial Sequence
  SAMD9L targeting guide sequence portion
gggaucuaagaaacagguggag

SEQ ID NO: 19924 - RNA, 22 nt, Artificial Sequence
  SAMD9L targeting guide sequence portion
gggauggcauuccuugacacug

SEQ ID NO: 19925 - RNA, 22 nt, Artificial Sequence
  SAMD9L targeting guide sequence portion
gggcuuccucaugguaauaugu

SEQ ID NO: 19926 - RNA, 22 nt, Artificial Sequence
  SAMD9L targeting guide sequence portion
ggggagaugggaucuaagaaac

SEQ ID NO: 19927 - RNA, 22 nt, Artificial Sequence
  SAMD9L targeting guide sequence portion
ggguaaugaauggaaaaaauaa

SEQ ID NO: 19928 - RNA, 22 nt, Artificial Sequence
  SAMD9L targeting guide sequence portion
gguaauauguguucucaaguuu

SEQ ID NO: 19929 - RNA, 22 nt, Artificial Sequence
  SAMD9L targeting guide sequence portion
gguaaugaauggaaaaaauaag

SEQ ID NO: 19930 - RNA, 22 nt, Artificial Sequence
  SAMD9L targeting guide sequence portion
ggucaaggaagacuuccuggug

SEQ ID NO: 19931 - RNA, 22 nt, Artificial Sequence
  SAMD9L targeting guide sequence portion
ggugaaggugacucuugaaauc

SEQ ID NO: 19932 - RNA, 22 nt, Artificial Sequence
  SAMD9L targeting guide sequence portion
ggugaaucucuuccuuuaagcc

SEQ ID NO: 19933 - RNA, 22 nt, Artificial Sequence
  SAMD9L targeting guide sequence portion
ggugacucuugaaaucaguugu

SEQ ID NO: 19934 - RNA, 22 nt, Artificial Sequence
  SAMD9L targeting guide sequence portion
gguggagauaaggcuguauuca

SEQ ID NO: 19935 - RNA, 22 nt, Artificial Sequence
  SAMD9L targeting guide sequence portion
gguggucaaggaagacuuccug

SEQ ID NO: 19936 - RNA, 22 nt, Artificial Sequence
  SAMD9L targeting guide sequence portion
gguugagaaguaaagggaacaa

SEQ ID NO: 19937 - RNA, 22 nt, Artificial Sequence
  SAMD9L targeting guide sequence portion
guaaagggaacaaagaggguaa

SEQ ID NO: 19938 - RNA, 22 nt, Artificial Sequence
  SAMD9L targeting guide sequence portion
guaauauguguucucaaguuuu

SEQ ID NO: 19939 - RNA, 22 nt, Artificial Sequence
  SAMD9L targeting guide sequence portion
guaaugaauggaaaaaauaagc

SEQ ID NO: 19940 - RNA, 22 nt, Artificial Sequence
  SAMD9L targeting guide sequence portion
guauauagcacagguugagaag

SEQ ID NO: 19941 - RNA, 22 nt, Artificial Sequence
  SAMD9L targeting guide sequence portion
guauucacaggagacaaaaaug

SEQ ID NO: 19942 - RNA, 22 nt, Artificial Sequence
  SAMD9L targeting guide sequence portion
gucaaggaagacuuccugguga

SEQ ID NO: 19943 - RNA, 22 nt, Artificial Sequence
  SAMD9L targeting guide sequence portion
gucaaggaaugccaucccagaa

SEQ ID NO: 19944 - RNA, 22 nt, Artificial Sequence
  SAMD9L targeting guide sequence portion
gucaccuucaccaggaagucuu

SEQ ID NO: 19945 - RNA, 22 nt, Artificial Sequence
  SAMD9L targeting guide sequence portion
gucauucacaacugauuucaag

SEQ ID NO: 19946 - RNA, 22 nt, Artificial Sequence
  SAMD9L targeting guide sequence portion
gucuccugugaauacagccuua

SEQ ID NO: 19947 - RNA, 22 nt, Artificial Sequence
  SAMD9L targeting guide sequence portion
gucuuccuugaccaccaucauu

SEQ ID NO: 19948 - RNA, 22 nt, Artificial Sequence
  SAMD9L targeting guide sequence portion
gugaaacauaggcuaauauaga

SEQ ID NO: 19949 - RNA, 22 nt, Artificial Sequence
  SAMD9L targeting guide sequence portion
gugaaggugacucuugaaauca

SEQ ID NO: 19950 - RNA, 22 nt, Artificial Sequence
  SAMD9L targeting guide sequence portion
gugaauacagccuuaucuccac

SEQ ID NO: 19951 - RNA, 22 nt, Artificial Sequence
  SAMD9L targeting guide sequence portion
gugaaucucuuccuuuaagcca

SEQ ID NO: 19952 - RNA, 22 nt, Artificial Sequence
  SAMD9L targeting guide sequence portion
gugaaugacaaaucagaauagc

SEQ ID NO: 19953 - RNA, 22 nt, Artificial Sequence
  SAMD9L targeting guide sequence portion
gugacucuugaaaucaguugug

SEQ ID NO: 19954 - RNA, 22 nt, Artificial Sequence
  SAMD9L targeting guide sequence portion
gugcaucugagaaugagcuucu

SEQ ID NO: 19955 - RNA, 22 nt, Artificial Sequence
  SAMD9L targeting guide sequence portion
gugcuauauacaugcuguucuc

SEQ ID NO: 19956 - RNA, 22 nt, Artificial Sequence
  SAMD9L targeting guide sequence portion
guggagauaaggcuguauucac

SEQ ID NO: 19957 - RNA, 22 nt, Artificial Sequence
  SAMD9L targeting guide sequence portion
guggucaaggaagacuuccugg

SEQ ID NO: 19958 - RNA, 22 nt, Artificial Sequence
  SAMD9L targeting guide sequence portion
gugucaaggaaugccaucccag

SEQ ID NO: 19959 - RNA, 22 nt, Artificial Sequence
  SAMD9L targeting guide sequence portion
guguucucaaguuuucaguguc

SEQ ID NO: 19960 - RNA, 22 nt, Artificial Sequence
  SAMD9L targeting guide sequence portion
guuagauggaaauaaggcaauc

SEQ ID NO: 19961 - RNA, 22 nt, Artificial Sequence
  SAMD9L targeting guide sequence portion
guucccauuuacaggugaaucu

SEQ ID NO: 19962 - RNA, 22 nt, Artificial Sequence
  SAMD9L targeting guide sequence portion
guucccuuuacuucucaaccug

SEQ ID NO: 19963 - RNA, 22 nt, Artificial Sequence
  SAMD9L targeting guide sequence portion
guucucaaguuuucagugucaa

SEQ ID NO: 19964 - RNA, 22 nt, Artificial Sequence
  SAMD9L targeting guide sequence portion
guucucucuguugagauugccu

SEQ ID NO: 19965 - RNA, 22 nt, Artificial Sequence
  SAMD9L targeting guide sequence portion
guucuggcuguugugcaucuga

SEQ ID NO: 19966 - RNA, 22 nt, Artificial Sequence
  SAMD9L targeting guide sequence portion
guugagaaguaaagggaacaaa

SEQ ID NO: 19967 - RNA, 22 nt, Artificial Sequence
  SAMD9L targeting guide sequence portion
guugagauugccuuauuuccau

SEQ ID NO: 19968 - RNA, 22 nt, Artificial Sequence
  SAMD9L targeting guide sequence portion
guugugaaugacaaaucagaau

SEQ ID NO: 19969 - RNA, 22 nt, Artificial Sequence
  SAMD9L targeting guide sequence portion
guugugcaucugagaaugagcu

SEQ ID NO: 19970 - RNA, 22 nt, Artificial Sequence
  SAMD9L targeting guide sequence portion
guuucacuuuauaggcaaugcg

SEQ ID NO: 19971 - RNA, 22 nt, Artificial Sequence
  SAMD9L targeting guide sequence portion
guuucuuagaucccaucucccc

SEQ ID NO: 19972 - RNA, 22 nt, Artificial Sequence
  SAMD9L targeting guide sequence portion
guuuucagugucaaggaaugcc

SEQ ID NO: 19973 - RNA, 22 nt, Artificial Sequence
  SAMD9L targeting guide sequence portion
uaaaggaagagauucaccugua

SEQ ID NO: 19974 - RNA, 22 nt, Artificial Sequence
  SAMD9L targeting guide sequence portion
uaaagggaacaaagaggguaau

SEQ ID NO: 19975 - RNA, 22 nt, Artificial Sequence
  SAMD9L targeting guide sequence portion
uaaagugaaacauaggcuaaua

SEQ ID NO: 19976 - RNA, 22 nt, Artificial Sequence
  SAMD9L targeting guide sequence portion
uaacauucucucuccugcuauu

SEQ ID NO: 19977 - RNA, 22 nt, Artificial Sequence
  SAMD9L targeting guide sequence portion
uaagaaacagguggagauaagg

SEQ ID NO: 19978 - RNA, 22 nt, Artificial Sequence
  SAMD9L targeting guide sequence portion
uaagaacuacgcauugccuaua

SEQ ID NO: 19979 - RNA, 22 nt, Artificial Sequence
  SAMD9L targeting guide sequence portion
uaagccaggggagaugggaucu

SEQ ID NO: 19980 - RNA, 22 nt, Artificial Sequence
  SAMD9L targeting guide sequence portion
uaagccauuuuugucuccugug

SEQ ID NO: 19981 - RNA, 22 nt, Artificial Sequence
  SAMD9L targeting guide sequence portion
uaaggcaaucucaacagagaga

SEQ ID NO: 19982 - RNA, 22 nt, Artificial Sequence
  SAMD9L targeting guide sequence portion
uaaggcuguauucacaggagac

SEQ ID NO: 19983 - RNA, 22 nt, Artificial Sequence
  SAMD9L targeting guide sequence portion
uaauauagauuaaauugaauau

SEQ ID NO: 19984 - RNA, 22 nt, Artificial Sequence
  SAMD9L targeting guide sequence portion
uaauauguguucucaaguuuuc

SEQ ID NO: 19985 - RNA, 22 nt, Artificial Sequence
  SAMD9L targeting guide sequence portion
uaaucaggcaggaaugauggug

SEQ ID NO: 19986 - RNA, 22 nt, Artificial Sequence
  SAMD9L targeting guide sequence portion
uaaucuauauuagccuauguuu

SEQ ID NO: 19987 - RNA, 22 nt, Artificial Sequence
  SAMD9L targeting guide sequence portion
uaaugaauggaaaaaauaagcc

SEQ ID NO: 19988 - RNA, 22 nt, Artificial Sequence
  SAMD9L targeting guide sequence portion
uacagccuuaucuccaccuguu

SEQ ID NO: 19989 - RNA, 22 nt, Artificial Sequence
  SAMD9L targeting guide sequence portion
uacaggugaaucucuuccuuua

SEQ ID NO: 19990 - RNA, 22 nt, Artificial Sequence
  SAMD9L targeting guide sequence portion
uacaugcuguucucucuguuga

SEQ ID NO: 19991 - RNA, 22 nt, Artificial Sequence
  SAMD9L targeting guide sequence portion
uaccaugaggaagcccucuaau

SEQ ID NO: 19992 - RNA, 22 nt, Artificial Sequence
  SAMD9L targeting guide sequence portion
uacccucuuuguucccuuuacu

SEQ ID NO: 19993 - RNA, 22 nt, Artificial Sequence
  SAMD9L targeting guide sequence portion
uacgcauugccuauaaagugaa

SEQ ID NO: 19994 - RNA, 22 nt, Artificial Sequence
  SAMD9L targeting guide sequence portion
uacuucucaaccugugcuauau

SEQ ID NO: 19995 - RNA, 22 nt, Artificial Sequence
  SAMD9L targeting guide sequence portion
uagaaugcugcuugagacuguu

SEQ ID NO: 19996 - RNA, 22 nt, Artificial Sequence
  SAMD9L targeting guide sequence portion
uagagggcuuccucaugguaau

SEQ ID NO: 19997 - RNA, 22 nt, Artificial Sequence
  SAMD9L targeting guide sequence portion
uagaucccaucuccccuggcuu

SEQ ID NO: 19998 - RNA, 22 nt, Artificial Sequence
  SAMD9L targeting guide sequence portion
uagauggaaauaaggcaaucuc

SEQ ID NO: 19999 - RNA, 22 nt, Artificial Sequence
  SAMD9L targeting guide sequence portion
uagauuaaauugaauauugaau

SEQ ID NO: 20000 - RNA, 22 nt, Artificial Sequence
  SAMD9L targeting guide sequence portion
uagcacagguugagaaguaaag

SEQ ID NO: 20001 - RNA, 22 nt, Artificial Sequence
  SAMD9L targeting guide sequence portion
uagcaggagagagaauguuaga

SEQ ID NO: 20002 - RNA, 22 nt, Artificial Sequence
  SAMD9L targeting guide sequence portion
uagccuauguuucacuuuauag

SEQ ID NO: 20003 - RNA, 22 nt, Artificial Sequence
  SAMD9L targeting guide sequence portion
uaggcuaauauagauuaaauug

SEQ ID NO: 20004 - RNA, 22 nt, Artificial Sequence
  SAMD9L targeting guide sequence portion
uauaaagugaaacauaggcuaa

SEQ ID NO: 20005 - RNA, 22 nt, Artificial Sequence
  SAMD9L targeting guide sequence portion
uauacaugcuguucucucuguu

SEQ ID NO: 20006 - RNA, 22 nt, Artificial Sequence
  SAMD9L targeting guide sequence portion
uauagauuaaauugaauauuga

SEQ ID NO: 20007 - RNA, 22 nt, Artificial Sequence
  SAMD9L targeting guide sequence portion
uauagcacagguugagaaguaa

SEQ ID NO: 20008 - RNA, 22 nt, Artificial Sequence
  SAMD9L targeting guide sequence portion
uauaggcaaugcguaguucuua

SEQ ID NO: 20009 - RNA, 22 nt, Artificial Sequence
  SAMD9L targeting guide sequence portion
uauauacaugcuguucucucug

SEQ ID NO: 20010 - RNA, 22 nt, Artificial Sequence
  SAMD9L targeting guide sequence portion
uauauagcacagguugagaagu

SEQ ID NO: 20011 - RNA, 22 nt, Artificial Sequence
  SAMD9L targeting guide sequence portion
uauauuagccuauguuucacuu

SEQ ID NO: 20012 - RNA, 22 nt, Artificial Sequence
  SAMD9L targeting guide sequence portion
uauauuuuuuauucaauauuca

SEQ ID NO: 20013 - RNA, 22 nt, Artificial Sequence
  SAMD9L targeting guide sequence portion
uaucuccaccuguuucuuagau

SEQ ID NO: 20014 - RNA, 22 nt, Artificial Sequence
  SAMD9L targeting guide sequence portion
uauguguucucaaguuuucagu

SEQ ID NO: 20015 - RNA, 22 nt, Artificial Sequence
  SAMD9L targeting guide sequence portion
uauguuucacuuuauaggcaau

SEQ ID NO: 20016 - RNA, 22 nt, Artificial Sequence
  SAMD9L targeting guide sequence portion
uauuaccaugaggaagcccucu

SEQ ID NO: 20017 - RNA, 22 nt, Artificial Sequence
  SAMD9L targeting guide sequence portion
uauuagccuauguuucacuuua

SEQ ID NO: 20018 - RNA, 22 nt, Artificial Sequence
  SAMD9L targeting guide sequence portion
uauucaauauucaauuuaaucu

SEQ ID NO: 20019 - RNA, 22 nt, Artificial Sequence
  SAMD9L targeting guide sequence portion
uauucaauuuaaucuauauuag

SEQ ID NO: 20020 - RNA, 22 nt, Artificial Sequence
  SAMD9L targeting guide sequence portion
uauucacaggagacaaaaaugg

SEQ ID NO: 20021 - RNA, 22 nt, Artificial Sequence
  SAMD9L targeting guide sequence portion
uauucugauuugucauucacaa

SEQ ID NO: 20022 - RNA, 22 nt, Artificial Sequence
  SAMD9L targeting guide sequence portion
uauuuccaucuaacauucucuc

SEQ ID NO: 20023 - RNA, 22 nt, Artificial Sequence
  SAMD9L targeting guide sequence portion
uauuuuuuauucaauauucaau

SEQ ID NO: 20024 - RNA, 22 nt, Artificial Sequence
  SAMD9L targeting guide sequence portion
uauuuuuuccauucauuacccu

SEQ ID NO: 20025 - RNA, 22 nt, Artificial Sequence
  SAMD9L targeting guide sequence portion
ucaacagagagaacagcaugua

SEQ ID NO: 20026 - RNA, 22 nt, Artificial Sequence
  SAMD9L targeting guide sequence portion
ucaaccugugcuauauacaugc

SEQ ID NO: 20027 - RNA, 22 nt, Artificial Sequence
  SAMD9L targeting guide sequence portion
ucaagagucaccuucaccagga

SEQ ID NO: 20028 - RNA, 22 nt, Artificial Sequence
  SAMD9L targeting guide sequence portion
ucaaggaagacuuccuggugaa

SEQ ID NO: 20029 - RNA, 22 nt, Artificial Sequence
  SAMD9L targeting guide sequence portion
ucaaggaaugccaucccagaag

SEQ ID NO: 20030 - RNA, 22 nt, Artificial Sequence
  SAMD9L targeting guide sequence portion
ucaaguuuucagugucaaggaa

SEQ ID NO: 20031 - RNA, 22 nt, Artificial Sequence
  SAMD9L targeting guide sequence portion
ucaauauucaauuuaaucuaua

SEQ ID NO: 20032 - RNA, 22 nt, Artificial Sequence
  SAMD9L targeting guide sequence portion
ucaauuuaaucuauauuagccu

SEQ ID NO: 20033 - RNA, 22 nt, Artificial Sequence
  SAMD9L targeting guide sequence portion
ucacaacugauuucaagaguca

SEQ ID NO: 20034 - RNA, 22 nt, Artificial Sequence
  SAMD9L targeting guide sequence portion
ucacaggagacaaaaauggcuu

SEQ ID NO: 20035 - RNA, 22 nt, Artificial Sequence
  SAMD9L targeting guide sequence portion
ucaccaggaagucuuccuugac

SEQ ID NO: 20036 - RNA, 22 nt, Artificial Sequence
  SAMD9L targeting guide sequence portion
ucaccuucaccaggaagucuuc

SEQ ID NO: 20037 - RNA, 22 nt, Artificial Sequence
  SAMD9L targeting guide sequence portion
ucacuuuauaggcaaugcguag

SEQ ID NO: 20038 - RNA, 22 nt, Artificial Sequence
  SAMD9L targeting guide sequence portion
ucagaauagcaggagagagaau

SEQ ID NO: 20039 - RNA, 22 nt, Artificial Sequence
  SAMD9L targeting guide sequence portion
ucagaugcacaacagccagaac

SEQ ID NO: 20040 - RNA, 22 nt, Artificial Sequence
  SAMD9L targeting guide sequence portion
ucaggcaggaaugauggugguc

SEQ ID NO: 20041 - RNA, 22 nt, Artificial Sequence
  SAMD9L targeting guide sequence portion
ucagugucaaggaaugccaucc

SEQ ID NO: 20042 - RNA, 22 nt, Artificial Sequence
  SAMD9L targeting guide sequence portion
ucaguugugaaugacaaaucag

SEQ ID NO: 20043 - RNA, 22 nt, Artificial Sequence
  SAMD9L targeting guide sequence portion
ucaugguaauauguguucucaa

SEQ ID NO: 20044 - RNA, 22 nt, Artificial Sequence
  SAMD9L targeting guide sequence portion
ucauuacccucuuuguucccuu

SEQ ID NO: 20045 - RNA, 22 nt, Artificial Sequence
  SAMD9L targeting guide sequence portion
ucauucacaacugauuucaaga

SEQ ID NO: 20046 - RNA, 22 nt, Artificial Sequence
  SAMD9L targeting guide sequence portion
ucauuccugccugauuagaggg

SEQ ID NO: 20047 - RNA, 22 nt, Artificial Sequence
  SAMD9L targeting guide sequence portion
ucauucucagaugcacaacagc

SEQ ID NO: 20048 - RNA, 22 nt, Artificial Sequence
  SAMD9L targeting guide sequence portion
uccaccuguuucuuagauccca

SEQ ID NO: 20049 - RNA, 22 nt, Artificial Sequence
  SAMD9L targeting guide sequence portion
uccaucuaacauucucucuccu

SEQ ID NO: 20050 - RNA, 22 nt, Artificial Sequence
  SAMD9L targeting guide sequence portion
uccauucauuacccucuuuguu

SEQ ID NO: 20051 - RNA, 22 nt, Artificial Sequence
  SAMD9L targeting guide sequence portion
ucccagaagcucauucucagau

SEQ ID NO: 20052 - RNA, 22 nt, Artificial Sequence
  SAMD9L targeting guide sequence portion
ucccaucuccccuggcuuauuu

SEQ ID NO: 20053 - RNA, 22 nt, Artificial Sequence
  SAMD9L targeting guide sequence portion
ucccauuuacaggugaaucucu

SEQ ID NO: 20054 - RNA, 22 nt, Artificial Sequence
  SAMD9L targeting guide sequence portion
uccccuggcuuauuuuuuccau

SEQ ID NO: 20055 - RNA, 22 nt, Artificial Sequence
  SAMD9L targeting guide sequence portion
ucccuuuacuucucaaccugug

SEQ ID NO: 20056 - RNA, 22 nt, Artificial Sequence
  SAMD9L targeting guide sequence portion
uccucaugguaauauguguucu

SEQ ID NO: 20057 - RNA, 22 nt, Artificial Sequence
  SAMD9L targeting guide sequence portion
uccugccugauuagagggcuuc

SEQ ID NO: 20058 - RNA, 22 nt, Artificial Sequence
  SAMD9L targeting guide sequence portion
uccugcuauucugauuugucau

SEQ ID NO: 20059 - RNA, 22 nt, Artificial Sequence
  SAMD9L targeting guide sequence portion
uccuggugaaggugacucuuga

SEQ ID NO: 20060 - RNA, 22 nt, Artificial Sequence
  SAMD9L targeting guide sequence portion
uccugugaauacagccuuaucu

SEQ ID NO: 20061 - RNA, 22 nt, Artificial Sequence
  SAMD9L targeting guide sequence portion
uccuugacacugaaaacuugag

SEQ ID NO: 20062 - RNA, 22 nt, Artificial Sequence
  SAMD9L targeting guide sequence portion
uccuugaccaccaucauuccug

SEQ ID NO: 20063 - RNA, 22 nt, Artificial Sequence
  SAMD9L targeting guide sequence portion
uccuuuaagccauuuuugucuc

SEQ ID NO: 20064 - RNA, 22 nt, Artificial Sequence
  SAMD9L targeting guide sequence portion
ucuaacauucucucuccugcua

SEQ ID NO: 20065 - RNA, 22 nt, Artificial Sequence
  SAMD9L targeting guide sequence portion
ucuaagaaacagguggagauaa

SEQ ID NO: 20066 - RNA, 22 nt, Artificial Sequence
  SAMD9L targeting guide sequence portion
ucuaaucaggcaggaaugaugg

SEQ ID NO: 20067 - RNA, 22 nt, Artificial Sequence
  SAMD9L targeting guide sequence portion
ucuagaaugcugcuugagacug

SEQ ID NO: 20068 - RNA, 22 nt, Artificial Sequence
  SAMD9L targeting guide sequence portion
ucuauauuagccuauguuucac

SEQ ID NO: 20069 - RNA, 22 nt, Artificial Sequence
  SAMD9L targeting guide sequence portion
ucucaacagagagaacagcaug

SEQ ID NO: 20070 - RNA, 22 nt, Artificial Sequence
  SAMD9L targeting guide sequence portion
ucucaaccugugcuauauacau

SEQ ID NO: 20071 - RNA, 22 nt, Artificial Sequence
  SAMD9L targeting guide sequence portion
ucucaaguuuucagugucaagg

SEQ ID NO: 20072 - RNA, 22 nt, Artificial Sequence
  SAMD9L targeting guide sequence portion
ucucagaugcacaacagccaga

SEQ ID NO: 20073 - RNA, 22 nt, Artificial Sequence
  SAMD9L targeting guide sequence portion
ucuccaccuguuucuuagaucc

SEQ ID NO: 20074 - RNA, 22 nt, Artificial Sequence
  SAMD9L targeting guide sequence portion
ucuccccuggcuuauuuuuucc

SEQ ID NO: 20075 - RNA, 22 nt, Artificial Sequence
  SAMD9L targeting guide sequence portion
ucuccugcuauucugauuuguc

SEQ ID NO: 20076 - RNA, 22 nt, Artificial Sequence
  SAMD9L targeting guide sequence portion
ucuccugugaauacagccuuau

SEQ ID NO: 20077 - RNA, 22 nt, Artificial Sequence
  SAMD9L targeting guide sequence portion
ucucuccugcuauucugauuug

SEQ ID NO: 20078 - RNA, 22 nt, Artificial Sequence
  SAMD9L targeting guide sequence portion
ucucucuccugcuauucugauu

SEQ ID NO: 20079 - RNA, 22 nt, Artificial Sequence
  SAMD9L targeting guide sequence portion
ucucucuguugagauugccuua

SEQ ID NO: 20080 - RNA, 22 nt, Artificial Sequence
  SAMD9L targeting guide sequence portion
ucucuguugagauugccuuauu

SEQ ID NO: 20081 - RNA, 22 nt, Artificial Sequence
  SAMD9L targeting guide sequence portion
ucucuuccuuuaagccauuuuu

SEQ ID NO: 20082 - RNA, 22 nt, Artificial Sequence
  SAMD9L targeting guide sequence portion
ucugagaaugagcuucugggau

SEQ ID NO: 20083 - RNA, 22 nt, Artificial Sequence
  SAMD9L targeting guide sequence portion
ucugauuugucauucacaacug

SEQ ID NO: 20084 - RNA, 22 nt, Artificial Sequence
  SAMD9L targeting guide sequence portion
ucuggcuguugugcaucugaga

SEQ ID NO: 20085 - RNA, 22 nt, Artificial Sequence
  SAMD9L targeting guide sequence portion
ucugggauggcauuccuugaca

SEQ ID NO: 20086 - RNA, 22 nt, Artificial Sequence
  SAMD9L targeting guide sequence portion
ucuguugagauugccuuauuuc

SEQ ID NO: 20087 - RNA, 22 nt, Artificial Sequence
  SAMD9L targeting guide sequence portion
ucuuagaucccaucuccccugg

SEQ ID NO: 20088 - RNA, 22 nt, Artificial Sequence
  SAMD9L targeting guide sequence portion
ucuuccuugaccaccaucauuc

SEQ ID NO: 20089 - RNA, 22 nt, Artificial Sequence
  SAMD9L targeting guide sequence portion
ucuuccuuuaagccauuuuugu

SEQ ID NO: 20090 - RNA, 22 nt, Artificial Sequence
  SAMD9L targeting guide sequence portion
ucuugaaaucaguugugaauga

SEQ ID NO: 20091 - RNA, 22 nt, Artificial Sequence
  SAMD9L targeting guide sequence portion
ucuuguucccauuuacagguga

SEQ ID NO: 20092 - RNA, 22 nt, Artificial Sequence
  SAMD9L targeting guide sequence portion
ucuuuguucccuuuacuucuca

SEQ ID NO: 20093 - RNA, 22 nt, Artificial Sequence
  SAMD9L targeting guide sequence portion
ugaaaacuugagaacacauauu

SEQ ID NO: 20094 - RNA, 22 nt, Artificial Sequence
  SAMD9L targeting guide sequence portion
ugaaacauaggcuaauauagau

SEQ ID NO: 20095 - RNA, 22 nt, Artificial Sequence
  SAMD9L targeting guide sequence portion
ugaaaucaguugugaaugacaa

SEQ ID NO: 20096 - RNA, 22 nt, Artificial Sequence
  SAMD9L targeting guide sequence portion
ugaaggugacucuugaaaucag

SEQ ID NO: 20097 - RNA, 22 nt, Artificial Sequence
  SAMD9L targeting guide sequence portion
ugaauacagccuuaucuccacc

SEQ ID NO: 20098 - RNA, 22 nt, Artificial Sequence
  SAMD9L targeting guide sequence portion
ugaaucucuuccuuuaagccau

SEQ ID NO: 20099 - RNA, 22 nt, Artificial Sequence
  SAMD9L targeting guide sequence portion
ugaaugacaaaucagaauagca

SEQ ID NO: 20100 - RNA, 22 nt, Artificial Sequence
  SAMD9L targeting guide sequence portion
ugaauggaaaaaauaagccagg

SEQ ID NO: 20101 - RNA, 22 nt, Artificial Sequence
  SAMD9L targeting guide sequence portion
ugacaaaucagaauagcaggag

SEQ ID NO: 20102 - RNA, 22 nt, Artificial Sequence
  SAMD9L targeting guide sequence portion
ugacacugaaaacuugagaaca

SEQ ID NO: 20103 - RNA, 22 nt, Artificial Sequence
  SAMD9L targeting guide sequence portion
ugaccaccaucauuccugccug

SEQ ID NO: 20104 - RNA, 22 nt, Artificial Sequence
  SAMD9L targeting guide sequence portion
ugacucuugaaaucaguuguga

SEQ ID NO: 20105 - RNA, 22 nt, Artificial Sequence
  SAMD9L targeting guide sequence portion
ugagaacacauauuaccaugag

SEQ ID NO: 20106 - RNA, 22 nt, Artificial Sequence
  SAMD9L targeting guide sequence portion
ugagaaguaaagggaacaaaga

SEQ ID NO: 20107 - RNA, 22 nt, Artificial Sequence
  SAMD9L targeting guide sequence portion
ugagaaugagcuucugggaugg

SEQ ID NO: 20108 - RNA, 22 nt, Artificial Sequence
  SAMD9L targeting guide sequence portion
ugagacuguucuggcuguugug

SEQ ID NO: 20109 - RNA, 22 nt, Artificial Sequence
  SAMD9L targeting guide sequence portion
ugagauugccuuauuuccaucu

SEQ ID NO: 20110 - RNA, 22 nt, Artificial Sequence
  SAMD9L targeting guide sequence portion
ugagcuucugggauggcauucc

SEQ ID NO: 20111 - RNA, 22 nt, Artificial Sequence
  SAMD9L targeting guide sequence portion
ugaggaagcccucuaaucaggc

SEQ ID NO: 20112 - RNA, 22 nt, Artificial Sequence
  SAMD9L targeting guide sequence portion
ugaugguggucaaggaagacuu

SEQ ID NO: 20113 - RNA, 22 nt, Artificial Sequence
  SAMD9L targeting guide sequence portion
ugauuagagggcuuccucaugg

SEQ ID NO: 20114 - RNA, 22 nt, Artificial Sequence
  SAMD9L targeting guide sequence portion
ugauuucaagagucaccuucac

SEQ ID NO: 20115 - RNA, 22 nt, Artificial Sequence
  SAMD9L targeting guide sequence portion
ugauuugucauucacaacugau

SEQ ID NO: 20116 - RNA, 22 nt, Artificial Sequence
  SAMD9L targeting guide sequence portion
ugcacaacagccagaacagucu

SEQ ID NO: 20117 - RNA, 22 nt, Artificial Sequence
  SAMD9L targeting guide sequence portion
ugcaucugagaaugagcuucug

SEQ ID NO: 20118 - RNA, 22 nt, Artificial Sequence
  SAMD9L targeting guide sequence portion
ugccaucccagaagcucauucu

SEQ ID NO: 20119 - RNA, 22 nt, Artificial Sequence
  SAMD9L targeting guide sequence portion
ugccuauaaagugaaacauagg

SEQ ID NO: 20120 - RNA, 22 nt, Artificial Sequence
  SAMD9L targeting guide sequence portion
ugccugauuagagggcuuccuc

SEQ ID NO: 20121 - RNA, 22 nt, Artificial Sequence
  SAMD9L targeting guide sequence portion
ugccuuauuuccaucuaacauu

SEQ ID NO: 20122 - RNA, 22 nt, Artificial Sequence
  SAMD9L targeting guide sequence portion
ugcuauauacaugcuguucucu

SEQ ID NO: 20123 - RNA, 22 nt, Artificial Sequence
  SAMD9L targeting guide sequence portion
ugcuauucugauuugucauuca

SEQ ID NO: 20124 - RNA, 22 nt, Artificial Sequence
  SAMD9L targeting guide sequence portion
ugcugcuugagacuguucuggc

SEQ ID NO: 20125 - RNA, 22 nt, Artificial Sequence
  SAMD9L targeting guide sequence portion
ugcuguucucucuguugagauu

SEQ ID NO: 20126 - RNA, 22 nt, Artificial Sequence
  SAMD9L targeting guide sequence portion
ugcuugagacuguucuggcugu

SEQ ID NO: 20127 - RNA, 22 nt, Artificial Sequence
  SAMD9L targeting guide sequence portion
uggaaaaaauaagccaggggag

SEQ ID NO: 20128 - RNA, 22 nt, Artificial Sequence
  SAMD9L targeting guide sequence portion
uggaaauaaggcaaucucaaca

SEQ ID NO: 20129 - RNA, 22 nt, Artificial Sequence
  SAMD9L targeting guide sequence portion
uggaauuuaagaacuacgcauu

SEQ ID NO: 20130 - RNA, 22 nt, Artificial Sequence
  SAMD9L targeting guide sequence portion
uggagauaaggcuguauucaca

SEQ ID NO: 20131 - RNA, 22 nt, Artificial Sequence
  SAMD9L targeting guide sequence portion
uggcauuccuugacacugaaaa

SEQ ID NO: 20132 - RNA, 22 nt, Artificial Sequence
  SAMD9L targeting guide sequence portion
uggcuguugugcaucugagaau

SEQ ID NO: 20133 - RNA, 22 nt, Artificial Sequence
  SAMD9L targeting guide sequence portion
uggcuuaaaggaagagauucac

SEQ ID NO: 20134 - RNA, 22 nt, Artificial Sequence
  SAMD9L targeting guide sequence portion
uggcuuauuuuuuccauucauu

SEQ ID NO: 20135 - RNA, 22 nt, Artificial Sequence
  SAMD9L targeting guide sequence portion
ugggaucuaagaaacaggugga

SEQ ID NO: 20136 - RNA, 22 nt, Artificial Sequence
  SAMD9L targeting guide sequence portion
ugggauggcauuccuugacacu

SEQ ID NO: 20137 - RNA, 22 nt, Artificial Sequence
  SAMD9L targeting guide sequence portion
ugguaauauguguucucaaguu

SEQ ID NO: 20138 - RNA, 22 nt, Artificial Sequence
  SAMD9L targeting guide sequence portion
uggucaaggaagacuuccuggu

SEQ ID NO: 20139 - RNA, 22 nt, Artificial Sequence
  SAMD9L targeting guide sequence portion
uggugaaggugacucuugaaau

SEQ ID NO: 20140 - RNA, 22 nt, Artificial Sequence
  SAMD9L targeting guide sequence portion
ugguggucaaggaagacuuccu

SEQ ID NO: 20141 - RNA, 22 nt, Artificial Sequence
  SAMD9L targeting guide sequence portion
uguauauagcacagguugagaa

SEQ ID NO: 20142 - RNA, 22 nt, Artificial Sequence
  SAMD9L targeting guide sequence portion
uguauucacaggagacaaaaau

SEQ ID NO: 20143 - RNA, 22 nt, Artificial Sequence
  SAMD9L targeting guide sequence portion
ugucaaggaaugccaucccaga

SEQ ID NO: 20144 - RNA, 22 nt, Artificial Sequence
  SAMD9L targeting guide sequence portion
ugucauucacaacugauuucaa

SEQ ID NO: 20145 - RNA, 22 nt, Artificial Sequence
  SAMD9L targeting guide sequence portion
ugucuccugugaauacagccuu

SEQ ID NO: 20146 - RNA, 22 nt, Artificial Sequence
  SAMD9L targeting guide sequence portion
ugugaauacagccuuaucucca

SEQ ID NO: 20147 - RNA, 22 nt, Artificial Sequence
  SAMD9L targeting guide sequence portion
ugugaaugacaaaucagaauag

SEQ ID NO: 20148 - RNA, 22 nt, Artificial Sequence
  SAMD9L targeting guide sequence portion
ugugcaucugagaaugagcuuc

SEQ ID NO: 20149 - RNA, 22 nt, Artificial Sequence
  SAMD9L targeting guide sequence portion
ugugcuauauacaugcuguucu

SEQ ID NO: 20150 - RNA, 22 nt, Artificial Sequence
  SAMD9L targeting guide sequence portion
uguguucucaaguuuucagugu

SEQ ID NO: 20151 - RNA, 22 nt, Artificial Sequence
  SAMD9L targeting guide sequence portion
uguuagauggaaauaaggcaau

SEQ ID NO: 20152 - RNA, 22 nt, Artificial Sequence
  SAMD9L targeting guide sequence portion
uguucccauuuacaggugaauc

SEQ ID NO: 20153 - RNA, 22 nt, Artificial Sequence
  SAMD9L targeting guide sequence portion
uguucccuuuacuucucaaccu

SEQ ID NO: 20154 - RNA, 22 nt, Artificial Sequence
  SAMD9L targeting guide sequence portion
uguucucaaguuuucaguguca

SEQ ID NO: 20155 - RNA, 22 nt, Artificial Sequence
  SAMD9L targeting guide sequence portion
uguucucucuguugagauugcc

SEQ ID NO: 20156 - RNA, 22 nt, Artificial Sequence
  SAMD9L targeting guide sequence portion
uguucuggcuguugugcaucug

SEQ ID NO: 20157 - RNA, 22 nt, Artificial Sequence
  SAMD9L targeting guide sequence portion
uguugagauugccuuauuucca

SEQ ID NO: 20158 - RNA, 22 nt, Artificial Sequence
  SAMD9L targeting guide sequence portion
uguugugcaucugagaaugagc

SEQ ID NO: 20159 - RNA, 22 nt, Artificial Sequence
  SAMD9L targeting guide sequence portion
uguuucacuuuauaggcaaugc

SEQ ID NO: 20160 - RNA, 22 nt, Artificial Sequence
  SAMD9L targeting guide sequence portion
uguuucuuagaucccaucuccc

SEQ ID NO: 20161 - RNA, 22 nt, Artificial Sequence
  SAMD9L targeting guide sequence portion
uuaaaggaagagauucaccugu

SEQ ID NO: 20162 - RNA, 22 nt, Artificial Sequence
  SAMD9L targeting guide sequence portion
uuaaauugaauauugaauaaaa

SEQ ID NO: 20163 - RNA, 22 nt, Artificial Sequence
  SAMD9L targeting guide sequence portion
uuaagaacuacgcauugccuau

SEQ ID NO: 20164 - RNA, 22 nt, Artificial Sequence
  SAMD9L targeting guide sequence portion
uuaagccauuuuugucuccugu

SEQ ID NO: 20165 - RNA, 22 nt, Artificial Sequence
  SAMD9L targeting guide sequence portion
uuaaucuauauuagccuauguu

SEQ ID NO: 20166 - RNA, 22 nt, Artificial Sequence
  SAMD9L targeting guide sequence portion
uuacaggugaaucucuuccuuu

SEQ ID NO: 20167 - RNA, 22 nt, Artificial Sequence
  SAMD9L targeting guide sequence portion
uuaccaugaggaagcccucuaa

SEQ ID NO: 20168 - RNA, 22 nt, Artificial Sequence
  SAMD9L targeting guide sequence portion
uuacccucuuuguucccuuuac

SEQ ID NO: 20169 - RNA, 22 nt, Artificial Sequence
  SAMD9L targeting guide sequence portion
uuacuucucaaccugugcuaua

SEQ ID NO: 20170 - RNA, 22 nt, Artificial Sequence
  SAMD9L targeting guide sequence portion
uuagagggcuuccucaugguaa

SEQ ID NO: 20171 - RNA, 22 nt, Artificial Sequence
  SAMD9L targeting guide sequence portion
uuagaucccaucuccccuggcu

SEQ ID NO: 20172 - RNA, 22 nt, Artificial Sequence
  SAMD9L targeting guide sequence portion
uuagauggaaauaaggcaaucu

SEQ ID NO: 20173 - RNA, 22 nt, Artificial Sequence
  SAMD9L targeting guide sequence portion
uuagccuauguuucacuuuaua

SEQ ID NO: 20174 - RNA, 22 nt, Artificial Sequence
  SAMD9L targeting guide sequence portion
uuauaggcaaugcguaguucuu

SEQ ID NO: 20175 - RNA, 22 nt, Artificial Sequence
  SAMD9L targeting guide sequence portion
uuaucuccaccuguuucuuaga

SEQ ID NO: 20176 - RNA, 22 nt, Artificial Sequence
  SAMD9L targeting guide sequence portion
uuauucaauauucaauuuaauc

SEQ ID NO: 20177 - RNA, 22 nt, Artificial Sequence
  SAMD9L targeting guide sequence portion
uuauuuccaucuaacauucucu

SEQ ID NO: 20178 - RNA, 22 nt, Artificial Sequence
  SAMD9L targeting guide sequence portion
uuauuuuuuccauucauuaccc

SEQ ID NO: 20179 - RNA, 22 nt, Artificial Sequence
  SAMD9L targeting guide sequence portion
uucaagagucaccuucaccagg

SEQ ID NO: 20180 - RNA, 22 nt, Artificial Sequence
  SAMD9L targeting guide sequence portion
uucaauauucaauuuaaucuau

SEQ ID NO: 20181 - RNA, 22 nt, Artificial Sequence
  SAMD9L targeting guide sequence portion
uucaauuuaaucuauauuagcc

SEQ ID NO: 20182 - RNA, 22 nt, Artificial Sequence
  SAMD9L targeting guide sequence portion
uucacaacugauuucaagaguc

SEQ ID NO: 20183 - RNA, 22 nt, Artificial Sequence
  SAMD9L targeting guide sequence portion
uucacaggagacaaaaauggcu

SEQ ID NO: 20184 - RNA, 22 nt, Artificial Sequence
  SAMD9L targeting guide sequence portion
uucaccaggaagucuuccuuga

SEQ ID NO: 20185 - RNA, 22 nt, Artificial Sequence
  SAMD9L targeting guide sequence portion
uucacuuuauaggcaaugcgua

SEQ ID NO: 20186 - RNA, 22 nt, Artificial Sequence
  SAMD9L targeting guide sequence portion
uucagugucaaggaaugccauc

SEQ ID NO: 20187 - RNA, 22 nt, Artificial Sequence
  SAMD9L targeting guide sequence portion
uucauuacccucuuuguucccu

SEQ ID NO: 20188 - RNA, 22 nt, Artificial Sequence
  SAMD9L targeting guide sequence portion
uuccaucuaacauucucucucc

SEQ ID NO: 20189 - RNA, 22 nt, Artificial Sequence
  SAMD9L targeting guide sequence portion
uuccauucauuacccucuuugu

SEQ ID NO: 20190 - RNA, 22 nt, Artificial Sequence
  SAMD9L targeting guide sequence portion
uucccauuuacaggugaaucuc

SEQ ID NO: 20191 - RNA, 22 nt, Artificial Sequence
  SAMD9L targeting guide sequence portion
uucccuuuacuucucaaccugu

SEQ ID NO: 20192 - RNA, 22 nt, Artificial Sequence
  SAMD9L targeting guide sequence portion
uuccucaugguaauauguguuc

SEQ ID NO: 20193 - RNA, 22 nt, Artificial Sequence
  SAMD9L targeting guide sequence portion
uuccugccugauuagagggcuu

SEQ ID NO: 20194 - RNA, 22 nt, Artificial Sequence
  SAMD9L targeting guide sequence portion
uuccuggugaaggugacucuug

SEQ ID NO: 20195 - RNA, 22 nt, Artificial Sequence
  SAMD9L targeting guide sequence portion
uuccuugacacugaaaacuuga

SEQ ID NO: 20196 - RNA, 22 nt, Artificial Sequence
  SAMD9L targeting guide sequence portion
uuccuugaccaccaucauuccu

SEQ ID NO: 20197 - RNA, 22 nt, Artificial Sequence
  SAMD9L targeting guide sequence portion
uuccuuuaagccauuuuugucu

SEQ ID NO: 20198 - RNA, 22 nt, Artificial Sequence
  SAMD9L targeting guide sequence portion
uucucaaccugugcuauauaca

SEQ ID NO: 20199 - RNA, 22 nt, Artificial Sequence
  SAMD9L targeting guide sequence portion
uucucaaguuuucagugucaag

SEQ ID NO: 20200 - RNA, 22 nt, Artificial Sequence
  SAMD9L targeting guide sequence portion
uucucagaugcacaacagccag

SEQ ID NO: 20201 - RNA, 22 nt, Artificial Sequence
  SAMD9L targeting guide sequence portion
uucucucuccugcuauucugau

SEQ ID NO: 20202 - RNA, 22 nt, Artificial Sequence
  SAMD9L targeting guide sequence portion
uucucucuguugagauugccuu

SEQ ID NO: 20203 - RNA, 22 nt, Artificial Sequence
  SAMD9L targeting guide sequence portion
uucugauuugucauucacaacu

SEQ ID NO: 20204 - RNA, 22 nt, Artificial Sequence
  SAMD9L targeting guide sequence portion
uucuggcuguugugcaucugag

SEQ ID NO: 20205 - RNA, 22 nt, Artificial Sequence
  SAMD9L targeting guide sequence portion
uucugggauggcauuccuugac

SEQ ID NO: 20206 - RNA, 22 nt, Artificial Sequence
  SAMD9L targeting guide sequence portion
uucuuagaucccaucuccccug

SEQ ID NO: 20207 - RNA, 22 nt, Artificial Sequence
  SAMD9L targeting guide sequence portion
uugaaaucaguugugaaugaca

SEQ ID NO: 20208 - RNA, 22 nt, Artificial Sequence
  SAMD9L targeting guide sequence portion
uugacacugaaaacuugagaac

SEQ ID NO: 20209 - RNA, 22 nt, Artificial Sequence
  SAMD9L targeting guide sequence portion
uugaccaccaucauuccugccu

SEQ ID NO: 20210 - RNA, 22 nt, Artificial Sequence
  SAMD9L targeting guide sequence portion
uugagaacacauauuaccauga

SEQ ID NO: 20211 - RNA, 22 nt, Artificial Sequence
  SAMD9L targeting guide sequence portion
uugagaaguaaagggaacaaag

SEQ ID NO: 20212 - RNA, 22 nt, Artificial Sequence
  SAMD9L targeting guide sequence portion
uugagacuguucuggcuguugu

SEQ ID NO: 20213 - RNA, 22 nt, Artificial Sequence
  SAMD9L targeting guide sequence portion
uugagauugccuuauuuccauc

SEQ ID NO: 20214 - RNA, 22 nt, Artificial Sequence
  SAMD9L targeting guide sequence portion
uugccuauaaagugaaacauag

SEQ ID NO: 20215 - RNA, 22 nt, Artificial Sequence
  SAMD9L targeting guide sequence portion
uugccuuauuuccaucuaacau

SEQ ID NO: 20216 - RNA, 22 nt, Artificial Sequence
  SAMD9L targeting guide sequence portion
uugucauucacaacugauuuca

SEQ ID NO: 20217 - RNA, 22 nt, Artificial Sequence
  SAMD9L targeting guide sequence portion
uugucuccugugaauacagccu

SEQ ID NO: 20218 - RNA, 22 nt, Artificial Sequence
  SAMD9L targeting guide sequence portion
uugugaaugacaaaucagaaua

SEQ ID NO: 20219 - RNA, 22 nt, Artificial Sequence
  SAMD9L targeting guide sequence portion
uugugcaucugagaaugagcuu

SEQ ID NO: 20220 - RNA, 22 nt, Artificial Sequence
  SAMD9L targeting guide sequence portion
uuguucccauuuacaggugaau

SEQ ID NO: 20221 - RNA, 22 nt, Artificial Sequence
  SAMD9L targeting guide sequence portion
uuguucccuuuacuucucaacc

SEQ ID NO: 20222 - RNA, 22 nt, Artificial Sequence
  SAMD9L targeting guide sequence portion
uuuaagaacuacgcauugccua

SEQ ID NO: 20223 - RNA, 22 nt, Artificial Sequence
  SAMD9L targeting guide sequence portion
uuuaagccauuuuugucuccug

SEQ ID NO: 20224 - RNA, 22 nt, Artificial Sequence
  SAMD9L targeting guide sequence portion
uuuaaucuauauuagccuaugu

SEQ ID NO: 20225 - RNA, 22 nt, Artificial Sequence
  SAMD9L targeting guide sequence portion
uuuacaggugaaucucuuccuu

SEQ ID NO: 20226 - RNA, 22 nt, Artificial Sequence
  SAMD9L targeting guide sequence portion
uuuacuucucaaccugugcuau

SEQ ID NO: 20227 - RNA, 22 nt, Artificial Sequence
  SAMD9L targeting guide sequence portion
uuuauaggcaaugcguaguucu

SEQ ID NO: 20228 - RNA, 22 nt, Artificial Sequence
  SAMD9L targeting guide sequence portion
uuuauucaauauucaauuuaau

SEQ ID NO: 20229 - RNA, 22 nt, Artificial Sequence
  SAMD9L targeting guide sequence portion
uuucaagagucaccuucaccag

SEQ ID NO: 20230 - RNA, 22 nt, Artificial Sequence
  SAMD9L targeting guide sequence portion
uuucacuuuauaggcaaugcgu

SEQ ID NO: 20231 - RNA, 22 nt, Artificial Sequence
  SAMD9L targeting guide sequence portion
uuucagugucaaggaaugccau

SEQ ID NO: 20232 - RNA, 22 nt, Artificial Sequence
  SAMD9L targeting guide sequence portion
uuuccaucuaacauucucucuc

SEQ ID NO: 20233 - RNA, 22 nt, Artificial Sequence
  SAMD9L targeting guide sequence portion
uuuccauucauuacccucuuug

SEQ ID NO: 20234 - RNA, 22 nt, Artificial Sequence
  SAMD9L targeting guide sequence portion
uuucuuagaucccaucuccccu

SEQ ID NO: 20235 - RNA, 22 nt, Artificial Sequence
  SAMD9L targeting guide sequence portion
uuugucauucacaacugauuuc

SEQ ID NO: 20236 - RNA, 22 nt, Artificial Sequence
  SAMD9L targeting guide sequence portion
uuugucuccugugaauacagcc

SEQ ID NO: 20237 - RNA, 22 nt, Artificial Sequence
  SAMD9L targeting guide sequence portion
uuuguucccuuuacuucucaac

SEQ ID NO: 20238 - RNA, 22 nt, Artificial Sequence
  SAMD9L targeting guide sequence portion
uuuuauucaauauucaauuuaa

SEQ ID NO: 20239 - RNA, 22 nt, Artificial Sequence
  SAMD9L targeting guide sequence portion
uuuucagugucaaggaaugcca

SEQ ID NO: 20240 - RNA, 22 nt, Artificial Sequence
  SAMD9L targeting guide sequence portion
uuuuccauucauuacccucuuu

SEQ ID NO: 20241 - RNA, 22 nt, Artificial Sequence
  SAMD9L targeting guide sequence portion
uuuugucuccugugaauacagc

SEQ ID NO: 20242 - RNA, 22 nt, Artificial Sequence
  SAMD9L targeting guide sequence portion
uuuuuauucaauauucaauuua

SEQ ID NO: 20243 - RNA, 22 nt, Artificial Sequence
  SAMD9L targeting guide sequence portion
uuuuuccauucauuacccucuu

SEQ ID NO: 20244 - RNA, 22 nt, Artificial Sequence
  SAMD9L targeting guide sequence portion
uuuuugucuccugugaauacag

SEQ ID NO: 20245 - RNA, 22 nt, Artificial Sequence
  SAMD9L targeting guide sequence portion
uuuuuuauucaauauucaauuu

SEQ ID NO: 20246 - RNA, 22 nt, Artificial Sequence
  SAMD9L targeting guide sequence portion
uuuuuuccauucauuacccucu

SEQ ID NO: 20247 - RNA, 20 nt, Artificial Sequence
  Example guide sequence portion
aaaaaaauguacuugguucc

SEQ ID NO: 20248 - RNA, 17 nt, Artificial Sequence
  17 nucleotide guide sequence 1
aaaauguacuugguucc

SEQ ID NO: 20249 - RNA, 17 nt, Artificial Sequence
  17 nucleotide guide sequence 2
aaaaauguacuugguuc

SEQ ID NO: 20250 - RNA, 17 nt, Artificial Sequence
  17 nucleotide guide sequence 3
aaaaaauguacuugguu

SEQ ID NO: 20251 - RNA, 17 nt, Artificial Sequence
  17 nucleotide guide sequence 4
aaaaaaauguacuuggu

SEQ ID NO: 20252 - RNA, 99 nt, Artificial Sequence
  OMNI-91 sgRNA scaffold sequence
guuguaguccccucguagugaaaacuaucaggucacuacaauaaaguagaacacugaaaagcucugacggcccacuuuccgugggucgucaucuuuuuu

SEQ ID NO: 20253 - RNA, 125 nt, Artificial Sequence
  OMNI-93 sgRNA scaffold sequence
gucuuaguacucuguuggaaacaacaauaguucuaagauaaggcuauuuaugccguaggguauggugguaucccuuuaauccaccuuuaagccauugcuuaugcaauggcuuaucuauauuuuuu

SEQ ID NO: 20254 - RNA, 107 nt, Artificial Sequence
  OMNI-103 sgRNA scaffold sequence
guuugagaguaguguaagaaauuacacuacaaguucaaauaaaaauuuauucaaauccauuugcuacauuguguagaauuuaaagaucuggcaacagaucuuuuuuu

SEQ ID NO: 20255 - RNA, 98 nt, Artificial Sequence
  OMNI-110 sgRNA scaffold sequence
guugugauucgcuuccgaaagcaagcgaaucacaauaaggauuauuccguugugaaaacauuuaagucgggccuccuucgguuggcucggcuuuuuuu

SEQ ID NO: 20256 - RNA, 101 nt, Artificial Sequence
  OMNI-114 sgRNA scaffold sequence
guuguacuugccugucgaaagauaggcaauauaacaaauauaauuucuucugaaauuauauguaaaauguuuaaagcccuccuuaucaggggggcuuuuuu

SEQ ID NO: 20257 - RNA, 89 nt, Artificial Sequence
  OMNI-120 sgRNA scaffold sequence
guuugagagccuuguuagaaauaacaaggcgagugcaaauaagguuuaaccgaauucaccguuuauggaccgcauugugcggauuuuuu

SEQ ID NO: 20258 - RNA, 107 nt, Artificial Sequence
  OMNI-129 sgRNA scaffold sequence
guuguaguucccuaauguugaaagacauuagguuacugcgaucaggcaguaugccucagagcuccgcccuaaccacgucuugugguuggggcgucuuugcauuuuuu

SEQ ID NO: 20259 - RNA, 101 nt, Artificial Sequence
  OMNI-156 sgRNA scaffold sequence
guugcggcuagacaucgaaagaugucuagucguuaauaagaaccuuucauacgaaaggauauuucaccauaaaaaaacaggcacuuuggugccuguuuuuu

SEQ ID NO: 20260 - RNA, 98 nt, Artificial Sequence
  OMNI-176 sgRNA scaffold sequence
guugugaauugcuuucgaaagaagcaauucacaauaaggauuauuccguugugaaaacauuaaaagcggcacucuuucgggugucgcuuucguuuuuu

SEQ ID NO: 20261 - RNA, 100 nt, Artificial Sequence
  OMNI-212 sgRNA scaffold sequence
guugugauuugcuuaggaaacuagcaaaucacaauaaggauuauuccguugugaacacaucagguucuuccccaucguccuuuaacgguggggauuuuuu

SEQ ID NO: 20262 - RNA, 90 nt, Artificial Sequence
  OMNI-215 sgRNA scaffold sequence
guugugauuugcuuuagaaauaagcaaaucacaauaaggauucuauccguugugaaaacauuucgggaggggcaacucucccgcuuuuuu

SEQ ID NO: 20263 - RNA, 87 nt, Artificial Sequence
  OMNI-229 sgRNA scaffold sequence
guuugagagcuuuguuagaaauaacaaagcgagugcaaauaagauuauucgaaaucgccuauacggaccgcauugugcggauuuuuu

SEQ ID NO: 20264 - RNA, 89 nt, Artificial Sequence
  OMNI-231 sgRNA scaffold sequence
guuugagaguaauguaggaaauuacauuacaaguucaaauaacgauuuaaucgaaaccaccuuucuagguacugcgguugcaguuuuuu

SEQ ID NO: 20265 - RNA, 95 nt, Artificial Sequence
  OMNI-238 sgRNA scaffold sequence
guuugagaguaguguaagaaauuacacuacgaguucaaauaaagaucauuccaaaucguucggcuuugccguucgcacaaguguugugcuuuuuu

SEQ ID NO: 20266 - protein, 9 aa, Artificial Sequence
  HA-tag
YPYDVPDYA

SEQ ID NO: 20267 - protein, 7 aa, Artificial Sequence
  NLS
PKKKRKV

SEQ ID NO: 20268 - protein, 19 aa, Artificial Sequence
  P2A
ATNFSLLKQAGDVEENPGP

SEQ ID NO: 20269 - protein, 236 aa, Artificial Sequence
  mCherry
MVSKGEEDNMAIIKEFMRFKVHMEGSVNGHEFEIEGEGEGRPYEGTQTAKLKVTKGGPLPFAWDILSPQFMYGSKAYVKHPADIPDYLKLSFPEGFKWERVMNFEDGGVVTVTQDSSLQDGEFIYKVKLRGTNFPSDGPVMQKKTMGWEASSERMYPEDGALKGEIKQRLKLKDGGHYDAEVKTTYKAKKPVQLPGAYNVNIKLDITSHNEDYTIVEQYERAEGRHSTGGMDELYK

SEQ ID NO: 20270 - DNA, 27 bp, Artificial Sequence
  HA-tag
tacccatacgatgttccagattacgct

SEQ ID NO: 20271 - DNA, 21 bp, Artificial Sequence
  NLS
ccaaaaaagaaaagaaaagtt

SEQ ID NO: 20272 - DNA, 57 bp, Artificial Sequence
  P2A
gccaccaacttcagcctgctgaagcaggccggcgacgtggaggagaaccccggcccc

SEQ ID NO: 20273 - DNA, 711 bp, Artificial Sequence
  mCherry
atggtgagcaagggcgaggaggataacatggccatcatcaaggagttcatgcgcttcaaggtgcacatggagggctccgtgaacggccacgagttcgagatcgagggcgagggcgagggccgcccctacgagggcacccagaccgccaagctgaaggtgaccaagggtggccccctgcccttcgcctgggacatcctgtcccctcagttcatgtacggctccaaggcctacgtgaagcaccccgccgacatccccgactacttgaagctgtccttccccgagggcttcaagtgggagcgcgtgatgaacttcgaggacggcggcgtggtgaccgtgacccaggactcctccctgcaggacggcgagttcatctacaaggtgaagctgcgcggcaccaacttcccctccgacggccccgtaatgcagaagaagaccatgggctgggaggcctcctccgagcggatgtaccccgaggacggcgccctgaagggcgagatcaagcagaggctgaagctgaaggacggcggccactacgacgctgaggtcaagaccacctacaaggccaagaagcccgtgcagctgcccggcgcctacaacgtcaacatcaagttggacatcacctcccacaacgaggactacaccatcgtggaacagtacgaacgcgccgagggccgccactccaccggcggcatggacgagctgtacaagtag

SEQ ID NO: 20274 - protein, 1091 aa, Artificial Sequence
  OMNI-91 CRISPR Nuclease
MSYAIGLDCGIASVGYAVMDLDEKGNPKRIIRLGSRIFPSAEHPKDGSSLALPRREARSTRRRLRRHKHRLERIRYMIVDEGILSQEQLDVLYSEPVSDIYMLRVDALDRPLTNEEFARVLIHLAQRRGFKSNRKVDKEDKDDGKLLTAVSGNTLLMKEKGYRTVGEMFAKDEKFSSQKRNKAENYTNTVSREMVEDEVHKLFAAQREFDCPFANETVENRYVNILFSQRSFEEGPGGDSPYGGNQIEKMIGRCTFFPEEQRAAKATYSFQYFSLLQAVNHIRIVSDGSIRTLRSDERKNVLEAAFQTDGLTFKRIRAVLGLSENDRFRNVYYRSDDKEEWESKTKFQYLHAYHEMRKRFDKLKKGHISIVSRTDLDEIGYALTVFKTDDKIISYLKEHTSLDKSEIDAVLMMPSFSKFGHISVKACKAIIPSLEQGMTYDKACENAGIKFQGHDSDGKTRYLPANPNDAPELEDINNPVVRRAVSQTIKVINAIIREQGESPAYLNLELAREMSKSFQDRQEIKKSHDQNNARNEKIKQEIADNFGKVNPSGQDILKLKLYHEQQGVSLYSQKVIAYDRLFEPGYVDIDHIVPYSICFDDSFRNKVLVFSNENREKGNRVPLDYLRGEEANNFVVYVKANVKDYKKKQRLLRSRPTEEDIKEFKERNLNDTKYLSRFLLNYIQDHLQFSESGSDKTKRVTSVNGSVTAYMRKRWGINKIRENGDLHHAVDAAVIACVTDGMINRISRWSKYHETEYEEFEGESYAVDPRTGEVLDRFPLPYPEFRKELDCRLFDNEKHMHEALTRLSNYRDVELSTIHPCFVSRMPNHKVTGPAHQDTVRSPRHYEEDGIVIAKTALQNLKLKDGEIEGYYKPESDRLLYDALKARLVEFGGDAKKAFKDDFYKPKSDGTRGPLVRKVKTFKKSSLNVSVNNGKGVADNGSMVRIDVFFVEGDGYYFIPIYVADTLKEELTNKAVVAHKSYDEWREMKEEDFQFSLYPNDLILVKKASGAIPLTINLKDSTLPPKIEKSEVFLYYRKSGIAGATIVCDNHDGSYYVTNLGIKTLASIEKYQVDVLGNYYKVGKERRQSFR

SEQ ID NO: 20275 - protein, 1050 aa, Artificial Sequence
  OMNI-93 CRISPR Nuclease
MKRKCGIGLDIGIGSIGYVVISRTNNFDARIEDLGVRVFDSGENIRKKASNAQERRGYRSVRRLLRRRKHRKERVKKFFLKIKLMNEIQLKAWEERNGDQNVLQTRIKGLSEKLKPEEILDCIIHICNHRGYREFYDEDSCNENINKDDLKKIEGGLASFDELYQHGNYKSVAEMILKDPVFKTETTFVDYRNHKNNNRYVLIKREFVKKELENILHQQSKYYPQLTENNIKIICDNMVFIQRDFETGPGNENDKTRRFMGFIDSIGKCMYYKDEKRAYRSTVIADIYALVNCLSQFSFINTETGEILLPDNAATKIIDTALLNAAITENDIKNILKPYHLEMRKPEKLQVKVPDTVRTLKILKSVLTNAGYKYEELIKEKQFDVNNPSKLHQLCLLLSENITPARRTRVLKAKGWNEKLQKEVIRKKFGGTASVCEKYMIDAIEAFKRGETYGNFQARMLKEREETLSESKKQKFLSPFDKKIDEELIKNTVVFKSVNETRKILNELIRRYGSPEYINIEVADDLGRSFKERSKIIKRNNDKQKDREKIKNKLIELGLRKEGEVKPFDIERYRLWEEQEGRDLYTGEAIPLEKILSGIYDVDHIVPFSLILDDSLQNKALVNLGVNRQQKGQQVPLAFLNVVDKIDYLKRVNVLYKNKKISTKKYKYLMLPNLYANSELLTEWKSRNINDTRYITRFLVNYLSANLLFDSTKTKNVFGVKGIITSKMRKLWLNKKTWGDEQKNRDNNLHHAADALVIANLTPAYLEIASDKIKLDRIYKDYHKKISNEYLTYLSKSVNKMVKYYGFNKEYAEKLLGTPNSRIPAMIRNIADEADIRLWDNSIEYYKDVSEEQFYKNVKAFYNDDTAFAKSVKPVLVSYKQNRKYQGKFTKDNPLKKNEIKGAFIEKIDSLGNVNILDAKEYYCAELYKNLQGQTILRGIRYVDLQKKNKKLYIISSYPEDYKKHIMYLFANDYIKVFDNDGKIKFNGYYKSIKNVNRNAIYYKNNNSNILEEKTISKKDVVKKYSVDILGKIGGEIKCSVPFLSLEENI

SEQ ID NO: 20276 - protein, 1348 aa, Artificial Sequence
  OMNI-103 CRISPR Nuclease
MSIKSDYFLGLDIGTDSIGWAVTDPEYHILRRKGKALWGIRLFDAANTAAERRTFRTSRRRIQRRRQRIRLLQELFAEEMVKLDPGFFQRLSDSAFWQEDKQEQQIYSLFTCENYTDVDYYREYPTIYHLRSALIQEKKEFDLRLLYLALHHLMKHRGHFLFNGSINNVTSFHTTFQTFADCLYDEFDIELECDSEDRFAEILKDKHARKTGKCSELEIICHIEKSNKQLKELFKLITGMKASLSVVFGDDELAEIEHNKISFSESSYDEVRLALEDEIQERTGILDIFHAVYSWAILADILEGGEYEGNSYLSVAKVSTYKKHGDDLRLLRTLVREYCPDHYKSFFSVSGKENYCAYAGTLKKNGKKQPIKRCSQEDFYKALKKLLNQMPTEQPEVKDIFIEIENGTFLPLQVSKDNGVIPYQVNKMELEKILQNAEEYLPFLKNIDEECGKTVSKKIIDLFEFRIPYYVGPLNTAKGENCWMVRKEAGRIYPWNFDEKVDRDQSAEKFIRRMTNQCTYLIHEDVVPKNSLLYSEFMVLNELNNVKIRSEKLPVELKQAIVLDLFKKQKQITGKKLLNYLNANGYDVKKEDLSGFDGNFKSSLSSYLTLKKVFGEELDKYSVQQMAEDIILWITLYGDDQKMLRRVIRKHYEQQLSEEQILSLSKLKFQGWGRLSRRLLSEMEGVDCETGECMTVMQGLRNTQNNLMQLLSQQFSFMELIEEENGNYYVDEITYDNLVKDMVISPSVKRAVWQTVQIVEEIKGVMGCQPKKIFVEMARSDEEKKRTVSRKDRLLEAYDAIKDEARQWQEELQKYSDGDFKAIKLYLYYTQMGQCMYTGRKIDLSQLNDATVWDRDHIYPQSKTKDDSLDNLVLVDRSVNAKKSDGMLSPEIQQRMRATWKYLKEKKLISEKKYERLTRVSPLTDEELAGFINRQLVETRQSSKAVATLLKRVYDEAEIVYVKAEAVSNFRRDNLDYIKVRDLNDYHHAKDAYQNIVVGNVFHEKFTSNPLRWLKNNPNTKYSLNQMFNFDLEKNGVVIWKRGKAGSIKCVEETLKRNDILFTRYAFCNKGGFFNQMLTAAPEDKTKAKGLVPIKKGMETWKYGGYTSVTPSHFMLVASKDKKGKEIRTIETVPLYRWKEFKENPDALLQYCREFYGLKEPKVLIPCIKKNARLVVNGFPMHLKGSTGKQLILQGAVQLCLNNENIKYLKKVTKYLEYNAQRRDKRTLLEVREVTGINKEENIQLYDVFVDKLSNTIYQYRPANPKDNLIKGREKFIELGLAEQCVVLGEVLHLFQCKPLTSDLTLIGGSPNTGTIKITKTISNCNVVKLLSQSIAGVKVREINLLII

SEQ ID NO: 20277 - protein, 1503 aa, Artificial Sequence
  OMNI-110 CRISPR Nuclease
MSKTILGLDLGSNSIGWAVVKAEVSESGEERLTGIEAAGSRILPMDAKLLSKFEKGNSVSQTETRRKARSARRRSERKKLRRARLLRTLRIIGWLPAHMASAIDDYGNIKRGSEPKMEWDGGNFMFTRAFEEMCAEFSARHPELKSVSHDWTVYYLRKKALREALTGQELAWVLLHFNQKRGYMPSRTDANIPAAKEGEKKEIVDVRVVGCKAAEAAKGRKATKAVTLIFDDGGEMNMPYYGTTPEEMVGRQMELLKTTKEGKTPTYTNPGENDWTFKKEKSKERITSAHKTVGEYLYDSLLEEPDVKLAGGKVTVLDRELYKSELEAILTKQAEFHDELKSPTLLAKCAEALYPNNPGHRAELMRHTMANLIMNDIILYQRPLKSKKSTIADCPFEYRTYMDKTGVEQVQKLKCAPRSHPLFQEFRLWQFVTNLRVTDEQTGNSEDILTDADRMKLFDALTPKSKVKAADVLKIVQKIIKPEESKKEKGAAPECHYRVNMVEGKDYPCYDMRAEIAACLTNKKSGPGLKAGDAYELITQTREEGDMTNEEYLWHISYSVTDPKEFEKAIKKWAETNGLPAEETARAFCALKPNKNYASYSLKAIKRLLPLMRMGRHWSFEAIDAKTRAKIEHFINGEEAEDMTPETMHKWAADKEDGGYDLKQAEESFQGLQPWKACMVVYGKLSGDEGLKWQTADDVREWLDKFPHGSLRNPIVEQVVLETMRVVADVWDKHGRPDEIHIEMARELKKTNAERAEMTRQNAQREEDNERIRKILRELASTCEDVKPFSPIQQARLKICVEGARLVAPAEEPKIEEIEKYKLWIKQNYKSPYTGESIELARLFTSDYEIEHIIPRSRYYDDSFNNKVICEAKVNQDKDNKMAMEYINAAQGKEVDLGGGRKVNILTPDEYVKRINDIYKNNSRKRENLLRTELPQDFNNRQMNDSRYIAVKVKELLNNAVRAEVGDDGAGSKNVVVCTGTVTDRLKQDWGVNDKWNEIILPRFMAMNEKVADKSDRNNRFIAKSNGHLIPTVPTDMLKGFNKKRIDHRHHAMDAIVIACASRAMVQFFSNQSSNKGGNMFENLRKSLCHKDANNVWVVNMPWETFPTDVKNALESITVSIKHRQRIVTRTTNHYTVTKGGRREVRKQATYAIRNSLHQETVWGLVNLQQKEQMSLKDAIKELRTFLSARIDDPQMRPKSQIVCKPLRRRISQLITAGKTDKEILALLDAESDVWSEEIKSGKVSVYTWSKDGGTRICATRFLSSLSDLFSKLTDEEKIKNKIASITDTGIQKILFNHLAQWQGGAATAFSPDGIKWMNENIQTLNGGKPHKPIYKVRRTETSDAKQQIGTNGNRSSKYVEAAKGTNLFFAVYVDDKGKRTFSTTPLRTVISRQLQGQSPVPETIGDNERLCFYLSPNDLVYVPTHGERYIEDRNRIYKFVSCFENRAWFIPAYVAKVIVDKSEFGSQNKIEVIDGVSIKNVCLPVEVDRLGNVTLKKIGEDD

SEQ ID NO: 20278 - protein, 1148 aa, Artificial Sequence
  OMNI-114 CRISPR Nuclease
MALRYILGIDLGISSIGTALFKILPDATDLNDIHSFEKILDAGVRICPVSEGAANRRNFRSQRNAKKHRKARKKALIALLQEYKLLPLDRSELELGLRSQPYALRAKAMQEPLSNAYELGYCIMNIAKLRGAGFIDEAEENEDEKKKSKTANRYQILEQELKTKNITLSEFLADHLAKNNCVRQRLDFIAEKVPFSVPRYLVKRDYYALMEKQAKHFGISDAQVKAIYSTIFQDFPKAPYANAPCSLLPETGSRLPKMHRLAEELRIYQQCNNIRYNTVEHTDIYQGLTRQMRDALAEKLMQGEGLNKTSIKKILQTFCKEKIKSINCYAQDEEITAIKPFAHVKAFAGIPTFWKLPQQKQDELIEFIADPLDVKAKSAKPVLYDEEKFLQICMEKLQLSGLEGEQKLYAALNLLPKDRTMLGKEASKQILQKLVDGIEVDGEWKAPTYYDAVTACNFTRASAEQKEYDFLPYYGEVLVNDILPIHPWHLERTAEEEKIGRIANPVVHSMLNQLRKVVNEIIALYGKPEMIKLEIARDFGLSKIKRDKLEKQRQANEKYNRTIDAELLRFGYASTPKNRLKYRLWKEQNGKDIYSRQEFKIADFNRYQIDHIIPQEAGGTNSFCNLVLTDKNNVKGNTFAYDFIQAKFPDCWESIKKEMEEMPKHKAWRFTAEAKTRYALYGDETDEDYADRRLQDTRYMAKAALRYLSCICKNILAIRGGMTAQLRHLWGFDGIEYELMGLNVPKERIDTETGEVSVDSNGDAAINPDWEAKPRIDHRHHAVDAMVLCAITRSLAQKMYRADNRNKKIDESIADMPFRKSPKNSELKSFRELVLEMLKTIKISHKPEHDTNTQLHNETAIRILDYDEKDQLYIANYMRSLSNIDSFSKLETIAVAENLGTSPTVRKMRERCAHIINDVSAQRFAAEKSLKQKNTDNAAQGLKEVKITDQALVQEAIRLAKVGNKYPRLEKFTLVNIRKKQQCGYEPASNHRVDFFVYTDGKKKDEIGWECIKSIDAANPNFKPKWQEYGELVWSVCKGDILELHFDKETLLKEKIPMAFVRQNEQQEYCMLAKVLKFTATYIVFVSAFDARADQKNALKENPEPFMRWKSGNCGLSFYCKAKARKVLLSPFGKVNKKLQRLWHGKKV

SEQ ID NO: 20279 - protein, 1383 aa, Artificial Sequence
  OMNI-120 CRISPR Nuclease
MEKQNYYIGLDMGTSSVGWAVTDDSYHIIRRKGKDMWGIREFEEAKTSAERRSHRISRRRLQRSKVRIGLIKMYFDEEIRKVDPFFYERLDNSKYYQEDKDEIVKSPNGVFNDKEYTDKDYYNQYPTIFHLRKELINNENAPYDVRIVYLAVLNLFKRRGHFLNSSLRLDDESAEFSLKDAYSNLLTIMADNLPEELSIAFPEIDSDNTYLELQNILGTREFGRKQKGEKVAKLLGIDRKQKKEMEIVNGMVGLSIDCCKLFDIEADSKITAKFSDFGYAEKEPEILDQLGDNYGSILMAIKTVYDIGSLTEILKGQKYLSFARVEDYEQHKADLRKLKKVVKKYALERYDYFFRQKEDGTYSAYVNSVNSEKYNDLGSKDTKPNRRNMKARSRDDFYKGVKKLLKGMPEDDADVIEINKKIENETFMPKQLTAGNGIIPNQLHAMELKKILDNASGYLDFLNDVDESGFAVKERILRLYTFTFPYYVGPISSGSKTGWAIRKPGFEKGVILPWELDEKIDRTETAKRFIDRMVRRCTYLNDEMVLPKSSLKYERYCVLNEINNIRIDNTRIDNDLKKRLFNEIYLNGKKPGRKKIESFLYRNGVPRDAQVTGIDKELNNALSSYGKFKEIFGDELEKDSVKKMVDDIIFHCTVYGDSKKFIYDYIQKNYPESEYPLLNKKTIKRIIGFKFKDWGRFSEEMLDLQGCNYETGEVYSILTALWETNNNFMELINSDSFEYKKLLEEKSGSAISSLAEVTPELLDEYYFSAPVKKMILQTMGVIKEIVQIMKCEPDRIFIEMTRSDGEKGDKGRKDSRKKALLDLYKNIIDELHDKNYWKDLIENADKDGRLRSKRMYLYIKQMGMDMYTGEPIDLDYLFDENRYDIDHIYPRHFVKDDNIENNLVLVNKASNAKKTDIYPIPGFIKDNPKVWKLWEMLHKRGLINDVKYSRLRNSEPFTDEQKAGFIARQLVETSQGTKGVSDILKQVLPQTKLVYSKAGNVSRFRSDNKFYKSRLINDYHHANDAYLNIVVGNVYYTKFTSSPMNFIKNEYSKDSKKFEYNLDKMFAWKVERDGYTAWIPLKKGNEYIATIKTVEKMLAKNTPLLTRQSFVKSGVINKVTLYGKNTATHETYIPLKMSDPKMQDVTKYGGYTSVNICYFFLVEHEKKGKKVRTIEALPGYLEKKVENDPAELERYCVEGLGLESPSVRYRKIRIQSLLKVDGYYMHLSGKSGNSLIVRNACALSIGKKWQDYIHYIEKSEENGFKYDDSRITKENNIELYDIISEKHIDGVYKKRPCGIGDAVKNGKKKFKELTKENQCKVILQILQISSIGNYKADLSLIGGASMMGNMRISKEITKNEKVMLIHQSVTGLFEDKLVDLKSI

SEQ ID NO: 20280 - protein, 1097 aa, Artificial Sequence
  OMNI-129 CRISPR Nuclease
MEYTIGLDIGVASVGWAVLADDSQGEPCHIQDLGVRVFEAAEHPQTGASLAAPRREARGARRRIRRRRHRKERIKALLVKGGVITQEEMDRLFQNSGFAQDVYTLRAEGLDRCLTPEEWTRVLLHLSQRRGYRSNSTAEAAKDKETGVLKQALAGNQALMQEKGYRTVGEMFCRDEKFLFVGPDGNLWRKTHNTPGDYSFTITRDMIQQEAAALFAAQRNYSNPYADEALEEQYTKILLSQRHFDQGPGGNSPYGKGDLRGFCTFEPQERRAFKATYTFEYFKLLQDINHIRILSPSEPTRKLTQPEREQLISLAMESPSLDFARVRKALNLPPECSFNVVPYERDKEEAEKKRKFPQMQSYHTLRKALNTVEKNYITHLTYAQLDEIGTILSLYKADDKRQEGLEALGLSQQVIDALLPLSFSKAGNLSLTAMKKLIPFLEQGINYDEACREVYGDHRRMAGGQRYRYLTLNKELWDSGALDAITNPVVLRALSQTTKVLNAIIRRYGPPQRICIELAREMSNNFDQRNKIQKRNEENRAKNEKLMEQIQKLKNARPTGQDLVKFRLYQEQDGMCLYSGTQLDMERLFEPGYVDVDHIIPYSISFDDSNRNKVLVLAKENRQKGNRIPMEYLASDPERRERYITLVERYVRDYRKRQKLLKEKLTPEDCQGFKERNLVDTQYITRTIYNLLKDYLEFSPSASKTPVRAVNGAVTSHMRRMLGLTKHREDGDLHHAMDAAVVAVTTPGMIQKISRYAKRRELGQKVVGKYVDPETGELLSQADFDKKYAPEFPEPYDGFRQELLARLSPDPDTRIRELHLPHYDDGGEIRPVFVSQMPRRKVTGPAHAQTIRSGKKPGYALSKKALTELKLDKNGEIAGYYNPKDDVLLYNALKARLQAYNGDAQKAFAQPFHKPKKDGTDGPVVNKVKILEKSSLNVSACGGIADNGGMVRIDVYRVPEDGYYFVPVYTADVVKGVLPTKAVVALKGYDFWKPMEAQHFLFSLYPGDLVRVVAKKPINMKLKNKNAKGELELLRKEWLGYYVGANIFTASIAISTHDRKYVRDGIGVKTLLLLEKYQVDPLGSYQKVHLPEKRQDF

SEQ ID NO: 20281 - protein, 1109 aa, Artificial Sequence
  OMNI-156 CRISPR Nuclease
MKYKLGLDLGSTSLGWAVVELNDMDNITRLVDMGVRIFPDGRDAQSHTPINVVRREHRQMRRRGDRVALRKKRTLQLIHKYGMDFDIHSNVSLENPYALRARAVVEKLQPQELGRVLFHLALRRGFKSNRKETRGEAGGKLKNATVSLQVAMGDKTLGQFQFESHRYRFADQFDGNKIKDGAFYPTRDMYLDEFNRICAVQELPDNVRKEFEHAIFHQRPLLPPVIGTCMFELGQLRAYKFEPVFQRFRVLQQINQLRIIDNGVVTELSGEQRQKLQDILLRTFDGVKRDKSGRVKITFAAVRKMLGLARGVRFNLETEKRKEMDVDTTAFAFSECGLSDFWYACPDDKKSQILARINDDTLNDDDLIDYLVDKCGLNSDVAAQLIQRPFEEGIANLSVCAMQKMLPFLAQGDLYHVAADKAGYNHADRGVVQMAQLPYYGDVAALKPSLVPDKNGVYRTMNATVHIALNQLRAVVNDLIAQFGSVPYAINIEMGRDVRAGARERAEIDSQQAANKRENDRIASELVVMGVRVNRENIQKYKLWENLGKNPLDRRCVYTGEIISKEKLFSPEFEIEHILPFSRTLDDSMANKTISAVAANRFKGNRSPDEAFTDSKSPWHYDDVVARAQNLPGATKWRFNRGAMSAFLHDQDCIARALNDTRFMTRMAVTYLQHVCADKYRVTGMPGRMTAMLRDAWHLDWWKDKADEEKYRGNHIHHAIDAFVVACTGVGTLQHLSRNAIETDKLFGKTQKEKRRQWFVDMNVPFDGFDYYDFKMRCENTIISYRQSQKSPKDSKGTIGCLHEDTAYNLEFFERGTTAVMSRRDALPTTDKDKKDFAKAFNNVNPKTLQMFLKDTGTTNDEPNIANKFLDWCTLRDIRKVRMYKRGVDVTTYVPVFRTKRQRDTYRAAYLNWYVASGIAGGIADKKMRLAQQEKEKALLQEFQNAAKLAYKWYVGGNNFCADVFKMRDDDKRYPKLRGRWQVEILSNYNAQLDAGSPLWRRKYATAERVMRLRINDMVMATFSKDDPKLPKGLVKTVMHQCTIENTDTVNVIFRVKKISSNGTIYLRPHFIAKEEGDTKSWAASAASLQEHNAHKVYVSPSGKLQCSE

SEQ ID NO: 20282 - protein, 1496 aa, Artificial Sequence
  OMNI-176 CRISPR Nuclease
MKKILGLDLGTNSIGWAVVNADIENGETKIKSIESAGSRIIPMDAEIMGKFETGNSVSQTAERTKCRGTRRLLERFLLRRERLNRVLNLMGFLPEHYSAKLDRYGKFIDESEPKLPWSKDENGKSKFLFQESFLEMCDEFKRVNTGIKNIPSDWTIYYLRKKALTKPISKFELAWILLNFNQKRGYYQFREEEIDNNKNKKEEYYKLQVLRVEKDNEEKGFTWYNMHLENGMIYKRKSKMPLDNWEGKIKEFIITTELNDDGSEKIDKYGDVKRSFRVPEENDWGLMKVKTEKEINDSKKTVGCFIYDALLQNPQQKIIGGLVRVVERKYYKEEILQILKVQKEFIPELKDKDLLIQCIESLYQSNEIRRNILNQKDFTYLFAEDILFYQRPLKTKKYLISNCPYETRNYKDKDADKITEPLKCVVKSHPLFQEFRLWQFISNLKIYKKGVIDQDCTNQFLKTEDDIVSLFDFLNNKKEIEQDSLLSAHFKIKKKDKENYRWNYVEDKKYPCNTTHASLLSRLKKIGVSANFLTKEIEEHLWHILYSINDKEEIYKALLKFAKKYGIEDSISFAEELQKEIFQKEYASYSLKAIKKLLPLMRCGDYWKEDNIDTKTKERIEKIITGEFDEEIDNKVREKLENYTNVSQFKGLPLWLACYVVYGRHSEAKEITKWNQPEDIDEYLKQFKQHSLNNPIVEQVVTETLRVVRDIWKQVGTIDEIHVEMGRELKKTNKERETISKQNIENENTNLRIKQILKEFKESYPDIEEVRPHSPSQQTIFRIYENYALANLSKTDKDYKEIIDISKKANPTSNEVARYKLWLEQKYQSPYTGEMIPLSKLFTSAYQIEHIIPQARYFDDSFNNKVICEAEVNGLKDRMLGYEFIKNNGGAIIELSGGKTVKIFTDEQYVDFVNKHYFNVKKKNLLLTDIPDDFINRQLNDSRYISKLVKNLLSNIVREKLENGEYEAEVTSKNLITCTGKITDRLKQDWGLNDVWNRIILPRFERLEELIGKEEFTTYNEEGHKIPAMPLDLQQGFKKKRIDHRHHAMDAIVIACATRNHVNLLNNESALSENKANRYQLQYKLRKREKAKINGEEKEVFKAFYKPWDTFTQDAEQVLRNIVVSFKQNLRVLTKATNKTQYIDKKTGKIKLKPQEKGELLAIRKSLHKETVFGEVNLREIKDIKLSEALNKPQSIVDKELKAEVYRLKALGKDDKAIIKHFKDNKDIWNSEIKNDKVKVYYFTKETNDRYFATRKAIGDIVSKKEDIKSITDSGIRKILENHLEANDGNLEKAFSPEGIEEMNKNIYELNNNKPHQPIYKARKFEKADKFAVGNRGNKNKKFVEAAKGTNLFLAIYELNDKRSYVTIPLNLVIDCQKKYKNNWKEQLDSVLKEEKYVKDSKTKLLFVISPNDLVYLPIQEELKTKQYSFDRSRIYKFVSSSGNQAFFVPYFIANAIIKTTELGANNKAERAWSGEMIKETCIPIQVDRLGNIKPL

SEQ ID NO: 20283 - protein, 1512 aa, Artificial Sequence
  OMNI-212 CRISPR Nuclease
MDEKRHILGLDLGTNSIGWAVVGETVDNVGNRKIEEIIDAGSRIIPMDAAMQSDFARGNSISQTADRTRYRSVRRLRERCLLRRERLHRVLALMGFLPKHFSDNLTRYGKFKDDVECKLAWANDDNGQPAFVFRRSYDEMLQLFWQVHPELMKQGMKVPYDWTIYYLRKKALTEAISGEELAWILLNFNQKRGYYQTRGEEQEEDKTKKEEYYALRVVDVVDTNEKRGRDTWYDVHLENGFVYHCKSKEKPDWIGKIKEFVVTTQLNEDGSPKTDKDGKERRSFRMPSENDWGLVKIKTQADIEKSGNTVGTYIFNALLANPKQKIKGKLVRTIERDFYKYELCAILNSQKRFIPQLQDNNLYEDCIEELYQQNTAYRNSISSHDFTYLFVDNIIFYQRPLKSKKSLIDECPYESHVYIDKDGNTVENHVKCIAKSNPMFQEFRLWQFVSNLKIYEHQKDENGRILEDKDVTCMFLADEHSRAALFTYLNDRSSITQKELLEKYFNIKKPRNKDAEMPYRWNYVEDKQYPCNETRGEIIKRLSKAGIDTDFLDHQAEMSLWHILYSVNDRLELHKALERFAQRNDLGSAFAGIMSKFPPFESDYGAYSEKAIKKLLPLMRMGDYWHEEDIDKSTLARINKIIDGEVDESISERTRNKAISLTNVNNFKGLPLWLACYVVYNRHSEAQDNDRWEKPDDIDAYLKKFKQHSLRNPVVEQVVTETLRVVKDIWKTHSHIDEIHVEMGRDMKNPSDKRKKMTERAIENENANLRIKALLAEFLNPEFGIENVRPYSPSQQEILRIYEDTALNSVDEPDDYIQEIVNKFTQSDVTKRPTRSEVLRYKLWLEQHYVSPYTGQTIPLSRLFTTDYEIEHVIPQSRYFDDSLSNKVICEAAVNKLKDNSLGYEFILKHHGEIVELGGGKRVQILEADSYCASVERTYKNNRAKMKKLLMEDIPSEFIERQMNDSRYISKLVKGLLSKIVMEEDEQEATSKNLIVCSGSVTDRLKREWGINDVWNHIVLPRFIRMNELTGTARFTTTSSSGHLIPDMPLELQKGFNKKRIDHRHHAMDAIVIACTTRDHVNLLSNEAASPKSNANRHQLSHKFRRYETVKVEKDGEVKTISVAKEFIMPWPSFPTDVEKVLNDIVVSFKQNLRVINKTSNHSLRYVDGKKKMVKQTAGDSWAIRKSMHKETVFGEVNLRFVKSFPLSEAIKRPNRILDKELKEKIKAMVKLEYTEKQIKAYFKENKDVWSDIDLKKIDMYYFTKETSDRLFATRKNIDTSFNEKKIKGEITDTAIQKIMLNHLAKYEGKSEFAFSPDGIDDMNRHIKELNGGNDHQPIYKVRVYEKADKFAVGQKGNKKTKFVEAAKGTNLFFAIYENEVLDKKTGEMIKKRSFRTIPLNEAISKMKAGLQLDEKAAFILSPNDLVYLPTEKELESGEISHPIDNSRIYKMVSSSKFQVYFVKVNVAASIQDKCEFSALNKMERALSGEMIKEICIPIKVDRLGHIIKIGI

SEQ ID NO: 20284 - protein, 1260 aa, Artificial Sequence
  OMNI-215 CRISPR Nuclease
MKILGLDLGIGSVGWALIETDDSRNPIRIIDMGCRIIPVSPDETKNFEKGSAETINGKRTFMRSARKRNYRYKMRRSLLKATLSALGMIDQKSEVALRSLSPMQLWQLRADAATPGKQITLAELGRVLMHLNQKRGYRHAKTDGNDSKQTQYVQGVNRNYADIKDLGMTIGQYQYSKLKESETHTAKGCSFVMHQIRDTVYPRQAYMEEFDTIMQVQARYYPAILTDEVIARLRDIIFFQRPLKSCKHLVSMCEFESHVVHKKADGSAVTVGPKVAPRTSPIAQATRLYEAINNITIVNSANRGNKDVKLYDEADFFNGVVPVALRKKDYVYRLNAEERQRIFDYLNTNEKLTATTLLKLLGLKKSDGFVPDKAIGRGIKGNDTYVRIASALGDYPGKEELLKFDLDIVDSGVVNADSGEILSIVSADVIKQPLYRLWHLLYSVSDKDELAGALGKQFGITDPEVVDRLCAIDFVTPGFSNRSAKFMRKLLPRLMDGITYADAAGAIGVNHSGSITSADNAQRPLDDRLKLLEKNSLRQPLVEKILNQMINVVNALVERYGAIDEARVELARQLKQSSEERVRATQSISKNEKENADIEAKIREFGIRPSRSRIQKYKMWEESGKVCMYCGIEVKDKEFLESHDAEVEHIIPRSLYFDDSFANKTCACHKCNHDKGNRTAYDYMSSLGGDKFAAYEQRVDNLYADGKISRRKHSYLLMKQSEIPTDFIERDLRQSQYIARKALEILRGTIRNVWASSGAVTGFFRHAWGYDNILHDLNVDKYQLAGLVENEEYEHRGQKHVRARIKGWTKRLDHRHHAIDALTIALTTQGYVQRLNNLSSQHGNLFDDLTQENVELRDNSSLLTKWAATRPHFTVEDVASRVSEIAISLKRGVRLATPAKRYIRRGGKRVLSQTGIVVPRGSLHEESIYGRIRVYDGAKAYKDAFQNPHLVVNNEVREEIERRIADAGNDVAKALKALKKSPFTVVINGEQHTLDTIPCYREEIVLRYKVDGLKATDVKYIVDKAVREAVAERYDECGGNQKLFQNSVNADPICLKGSPMPIKSVRCMTGLNAGSLAGVRKDGSGKIIGLAKTGDNHHVAFYRDENGKECSMITSRWGAIRRKLNGIPAVVTDPAAAWVRLEYIADEAVAAEIAASLPMPGWQFIQSMRRNDMFVLGMGDEAFADAVAAGDQSTLARHLYRVQTISNSDYRFRGHTETTVDESNEAKVMKSVLRIQSSGALAALTPRKVKVSLTGEIIPL

SEQ ID NO: 20285 - protein, 1395 aa, Artificial Sequence
  OMNI-229 CRISPR Nuclease
MEKNYFVGLDMGTSSVGWAVTDENYNLIRKKGKDLWGIREFEPANTAQERRANRISRRRRQRELIRLGLVKDYFADAIATVDSSFYQRLENSKYYLEDKDEDVRTSNGIFNDKEYKDKDYYKEYPTIYHLRKELIENKNKPYDVRLVYLAISNLFKRRGHFLNNSLNVDNGKFDVNIKEAYEELLNSISRAFSDDESESLTMPVINEDCVYKELEKILGNRDYSRKYKAEKIRDLLNIDKKAKKQNEVINGIVGLKIDCCKAFGITDSEEKIEAKFSEFGYSEKEPGILELLGDVLGEVLVNIKRIYDAGTLTELLKGYNYLSFARCSDYEKHKEDLRLLKMLVKKYQPEQFDSMFRDTHDGSYSAYVNSSNSEKYNYSENGIKKPNRRNMDKRSKADFYSTVKKMLSPFANEDERVQTILDEMENGTFMPKQLNGDNGVIPNQLHAIELKVILQNASEYLPFLNEIDGSGLSVAERIYKLFTFTLPYYIGPTTEKSKTGWVVRNKGYENTHVLPWNMNDVIDQEKTHKEFIERMVRRCTYMNNEQVLPKNSLLYEKFCVLNEINNIRIDNVRIDNNLKKTIYNELYKKGKKPTLKKLHDCLILNGISESAQITGIDREINNSLASYGKFAPIMGELLDTDDGRKVVEDIIYTFTIFGDDRKYLKEYLLNTYPENEYPYMTLSNIKRILGFKFSDWGRFSKELLMLEGYNRETGEIYTLLDALWEENYNFMELINSPVFSFKESMDKLEKNTLSSLAELDVEVLDRYYFSAPVKRMILQTNGVLKEIVKVMGGAPRKIFIEMTRSDEQKGDAGRTSSRKKQLLDLYKNVKQEVADRKYWSDLIEHESETGRIKSKKMYLYIKQMGCDMYTGEPIDLDELFTNRYDIDHIYPRHYVTDNNIENNLVLTNKASNEHIKKDYYPIPEKIRNNPATIELWDRLHANGMINDIKYARLRCKEEFSDEQKANFIARQLVETSQGTKGISDLLRQMLPTSELVFVKANNVSRFRQNKGRRHKNGDNSPVEGFSKSRLINDFHHANDAYLNIVVGNVYHTKFTSNPLNYIKKDYRQNKENFEYNLGRMFETKVVRNGYVAWIPEGNKENLEPTINTVNKVMSRNTPLYTRKAFVKPGIVNKVTIYGKRKATPERYMPLKSGDPKIADVTKYGGMTSISICYYFLVEHEVKGKRIRTIEGLPGYMHTRVENNPDELEKYCRDVLKLVNFSIRYRKIRIQSLLKVNGYRANLSGKTGDALILRNAEPLYLPDRYQDYIAYLEKHSEEEYHDKLDKEVNIQIYDILMEKFKDGIYRNRAKTVGNIMSNGRGQFIELSVEKQYFVINEILKLTTIGTLTAALGDIGGRSNNGKFTVGKKISDLDSCQLINTSYTGIFNSAPIDLKTV

SEQ ID NO: 20286 - protein, 1357 aa, Artificial Sequence
  OMNI-231 CRISPR Nuclease
MNNKEYFLGLDIGTGSVGWAVTDTQYNLIKINRKYAWGAVLFDTAKGAEERRVNRCARRRYQREKQRINLLQELFEEEIYKVDSGFFHRLNESRYVYADKRDEKGEKPELPYSLFVDENYTDVDYHREFPTVYHLRKALMTEDRAFDVRLLYLAIAHIIRNRGHFLSNMGMDEVNLDFSKIFGDLMNCWKENMEDESRNSVLELENETIENIEKIMKNSELTKTAKKQKILEELSGFSKEFKELIALITGGKVSLAKLFDKKEYDTLEIDKICFDEASFEENEEIYATNLDDYFEIITKAKAVYDWMILSNIFKDDKSGYLSCAKVADYEKHKRDLKNLKEAIRNDSIGDEEDKRNLYKQTFGVPKKGEENYSKYIGMTASKGSKFVIDGAKCSKYDFYKFVKKNIIPKLKDGELKEYIEKEISLESFMPKTRVKENAIIPYQIHAKELKKILECAEAYMPFLKERDDSGKTVSEKIMMLLTFRVPYYVGPLNTASSQAWVKRNGTGRVTPWNFETMINVDLSAEKFIERMTSKCTYLKNEKVLPKSSLVYEEYMVLNELNKLQIKSEPISVELKNDIYHDLFERKLKVTLKKLVDYLKREKGYTDITKEDISGIDIDFKSSLKSYHAFKREFTDVNLSESEKEDIIKDMTLFGAEPKLLKKRLYAKFPDYESQLNSLIKSLNCNGWGRLSYKLLNGIAVEIPGQGMVGTVLYQLRNTNNNLMEILEKSGSPYAKLIEEENKTDDSHKINYELVKELYVSPATKRQIWKAIQVVEEISHAMGHPPKRLFVEMAREHMESKRSITRKNKLLDLYKSIKNEKELYEELKGQPEDKLRSDKLYLYYTQFGTCAYTGKKIELSELFNNNLYDIDHIYPQSKTADDSLDNRVLVCKDSNGYKSDVYPIDSDIQKKMWNIWYLWYSKGLISKEKYKRLTRTSELTNDELTGFINRQLVETRQSTKEIMKLMRQLLPDTELVYSKAGNVSRFRQKYKILKVRELNDYHHARDAYLNIVVGNAYHLRFTKDIRNYFMKYGTYRTYNLKKMFEKDITFQEEVAWRAGERGTIQTVLRFMNCDKVLVTRQTFERKGALFDVQPKKKGEGQVPIKSGINNERLAVIEKYGGYNGATISYFTLIEGLKNNKNKKRYIIPVPLYLCHKIEKDELYAKQFFEKESKLSNIRIIRKILIQTLMIDEGFKMRLAGKSGTQLIFHNSNELSLNKKHFKCLKEIEKFILDRKDKPDATINEKSELAGNQMLDIYNIFIDKLMNSVYSKELGKHGEFLNNGLEQFNKLSLEDQAIQLHELLKFFQCTPEMPDLSRVGGSKSIGAIRSSMDVTKRSKLAIIHQSVTGIYEKIERINE

SEQ ID NO: 20287 - protein, 1378 aa, Artificial Sequence
  OMNI-238 CRISPR Nuclease
MDNKKIFLGLDIGTNSVGWAVTDDEYRLRKFKNDLMWGVHLFDEAQQSADRRAFRTARRRLDRRKQRIALLQEFFAPEIIKKDPTFFIRLKESALLPQDREHRNSSIFFNDDNYTDKEYFSQFPTIHHLITELMKNDNPHDVRLVYLACSYILAHRGHFLFEVEKDDIESIKKFAPIYAEFIDTLNNICDSIPFDDNISELEEILRLRCTVSEKEKRLTALWFAGKKPSRDLCEGLRFDLLIKLLSGGKTKLEELFINDEYKDLEVSSVCAASADFGDILDSLAGVVTPEQFSLLSAVKKLNDWSLLVNILKNSDSISHSKIKEYEAHKKDLEMLKGICRKYLNKTEYNSIFRDKEEKNKSYNSYINSPKNCSQEDFCKFVRTFIDKIKCEENDKQTLEYLKQKCADKTLCPKQVNTNNRVIPYQLYYHELKCILDNACIYLDFLNERDKYGTVADKILSIMEFRIPYYVGPLVNHSDNPNAWMIRKSEGIIRPWNFDEMVDLDKSEVEFIKRMTCRCTYLAGEDVLAKNSLLYCKYTVLNEINNITVDGKKISVAAKQKIYNEQFMKKRRVTVKMIGNLLHSCGEMTSEQKLGGIDLTIRSSLKSYHDFKSMLERKVLCESDVEKIIERITVTTDITRLKSWLKQEYPSISAEDVKYISKLNYKDYGRLSRRLLENVYETDTNTGEVVNEGNIITRLWETNDNLMQLLSSKYKYMERIKALNKEYYSDPKHSLTISDRLKEMYVPTAVRRSINRTLDVVNEIKSIAGKDPDKIFIEMARENDMTKKGVRTKSRREQIKTLFEDAKKLSDMSAEIAHLEEKLSETDDGKLRSEKYYLYFTQLGRCMYTGHPIDFEKLGGDTYYNIDHIFPQAKIKDDSLENKVLVESEANGTKSDTYPIDKDIRDKMRGFWKSLHEKKLIGDKKLQRLIRSTPFSEDELAGFISRQLVETRQSTKAAAELLKELCPESEIVYVKAELASDFRHETDMLKCREINDLHHAKDAYLNIVMGNVYNAKFTKDPLNFIRSGEHYSLKMFKKNADGKTSGLLTHKVERNGTTVWDPAKSFDTVRKMMSKNSVRYVRYTYKRKGGLFNQMPESKKPGLIQRKKGLKTEKYGGYNNASVSTFGIIKCKNDIVIIPIEIMKEYKFFSDNIFAKQYALEKLENIYPQKKYQSLTCEDIIVPCIHYQDGSKRLPILKINSLLEVNGFRINLCSKDSGGKYMIVSGAESLICSYQDEKYIKSVCSYAAKTIDEKSLQYNGISYERNLDIYDLICQKCANGHFSKWKKFRDTSIVLNKKRDIFISLSLNEQICALKEIVNILKSGRSVYCDLSAIEESKQSCISKLGAVLTSIKSVSDIRIIDQSPTGLYEKKSVNLLEL

1. A method for modifying in a cell a mutant allele of the sterile alpha motif domain containing 9 like (SAMD9L) gene having a mutation associated with ATXPC syndrome, the method comprising
introducing to the cell a composition comprising:
at least one CRISPR nuclease or a sequence encoding a CRISPR nuclease; and
a first RNA molecule comprising a guide sequence portion having 17-50 nucleotides or a nucleotide sequence encoding the same,
wherein a complex of the CRISPR nuclease and the first RNA molecule affects a double strand break in the mutant allele of the SAMD9L gene.

2. The method of claim 1, wherein the first RNA molecule targets the CRISPR nuclease to a SNP position of the mutant allele.

3. The method of claim 2, wherein the SNP position is any one of rs2157743, rs78002733, rs6964942, rs6965114, rs574912862, rs66986908, rs2374628, rs7786423, rs2374629, rs4267, rs71830352, 7:93130660_A_AGTGT, rs10236444, rs4268, rs10282508, rs1029357, rs10488532, rs1133906, rs61599939, and rs34330527.

4. The method of claim 2 or 3, wherein the guide sequence portion of the first RNA molecule comprises 17-50 contiguous nucleotides containing nucleotides in the sequence set forth in any one of SEQ ID NO: 9105, SEQ ID NOs: 1-9104, or SEQ ID NOs: 9106-20246 that targets a SNP position of the mutant allele.

5. The method of any one of claims 2-4, wherein the SNP position is in an exon of the SAMD9L mutant allele.

6. The method of any one of claims 2-5, wherein the SNP position contains a heterozygous SNP.

7. The method of claim 1, wherein the first RNA molecule targets the CRISPR nuclease to the mutation associated with ATXPC syndrome.

8. The method of claim 7, wherein the mutation associated with ATXPC syndrome is any one of 7:93131324_A_G, 7:93131411_G_C, 7:93131438_C_T, 7:93131495_T_C, 7:93132080_G_C, 7:93132130_C_T, 7:93132385_C_G, 7:93132434_A_T, 7:93132530_C_G, 7:93132545_T_C, 7:93132619_T_C, 7:93132872_C_A, 7:93133009_A_G, 7:93133016_G_A, 7:93133016_G_T, 7:93133300_A_G, 7:93133332_G_T, 7:93133453_A_T, 7:93133790_A_G, 7:93133858_TA_CT, 7:93133907_G_A, 7:93134063_C_A, 7:93134063_C_T, 7:93134095_G_A, 7:93134423_A_T, 7:93134973_C_A, 7:93134973_C_G, 7:93134993_T_C, 7:93135232_C_G, 7:93135268_CC_GA, 7:93135269_C_T, 7:93135313_T_C, 7:93135314_C_T, 7:93135604_G_A, 7:93135805_A_G, 7:93135822_TAA_ACT, 7:93135822_TAA_GCT, and 7:93135823_A_G.

9. The method of claim 7 or 8, wherein the guide sequence portion of the first RNA molecule comprises 17-50 contiguous nucleotides containing nucleotides in the sequence set forth in any one of SEQ ID NOs: 1-20246 that targets a mutation associated with ATXPC syndrome.

10. The method of any one of claims 7-9, further comprising introduction of a donor molecule that encodes a synthetic splice site.

11. The method of claim 1, further comprising introducing to the cell a second RNA molecule comprising a guide sequence portion having 17-50 nucleotides or a nucleotide sequence encoding the same, wherein a complex of the second RNA molecule and a CRISPR nuclease affects a second double strand break in the SAMD9L gene.

12. The method of claim 11, wherein the guide sequence portion of the second RNA molecule comprises 17-50 contiguous nucleotides containing nucleotides in the sequence set forth in any one of SEQ ID NOs: 1-20246 other than the sequence of the first RNA molecule.

13. The method of any one of claims 11-12, wherein the second RNA molecule comprises a non-discriminatory guide portion that targets both functional and mutated SAMD9L alleles.

14. The method of any one of claims 11-13, wherein the second RNA molecule comprises a non-discriminatory guide portion that targets any one of a SAMD9L untranslated region (UTR), an intergenic region upstream of SAMD9L, an intergenic region downstream of SAMD9L, or Intron 4 of SAMD9L.

15. The method of any one of claims 11-14, wherein the second RNA molecule comprises a non-discriminatory guide portion that targets a sequence that is located within a genomic range selected from any one of 7:93130717-7:93131216, 7:93129556-7:93130056, 7:93135992-7:93136491, and 7:93130068-7:93130567.

16. The method of any one of claims 11-15, wherein the second RNA molecule comprises a non-discriminatory guide portion that targets a sequence that is located up to 500 base pairs from the sequence targeted by the first RNA molecule.

17. The method of any one of claims 11-16, wherein a portion of an exon is excised from the mutant allele of the SAMD9L gene.

18. The method of any one claims 11-16, wherein the first RNA molecule targets a SNP position in the 3′ UTR of the mutated allele, and the second RNA molecule comprises a non-discriminatory guide portion that targets downstream of a polyadenylation signal sequence that is common to both a functional allele and the mutant allele of the SAMD9L gene.

19. The method of any one claims 11-16, wherein the first RNA molecule targets a SNP position downstream of a polyadenylation signal of the mutated allele, and the second RNA molecule comprises a non-discriminatory guide portion that targets a sequence upstream of a polyadenylation signal that is common to both a functional allele and the mutant allele of the SAMD9L gene.

20. The method of any one of claims 18-19, wherein the polyadenylation signal is excised from the mutant allele of the SAMD9L gene.

21. A modified cell obtained by the method of any one of claims 1-20.

22. A first RNA molecule comprising a guide sequence portion having 17-50 contiguous nucleotides containing nucleotides in the sequence set forth in any one of SEQ ID NOs: 1-20246.

23. A composition comprising the first RNA molecule of claim 22 and at least one CRISPR nuclease.

24. The composition of claim 23, further comprising a second RNA molecule comprising a guide sequence portion having 17-50 contiguous nucleotides, wherein the second RNA molecule targets a SAMD9L allele, and wherein the guide sequence portion of the second RNA molecule is a different sequence from the sequence of the guide sequence portion of the first RNA molecule.

25. The composition of claim 24, wherein the guide sequence portion of the second RNA molecule comprises 17-50 contiguous nucleotides containing nucleotides in the sequence set forth in any one of SEQ ID NOs: 1-20246 other than the sequence of the first RNA molecule.

26. A method for inactivating a mutant SAMD9L allele in a cell, the method comprising delivering to the cell the composition of any one of claims 22-25.

27. A method for treating ATXPC syndrome, the method comprising delivering to a cell of a subject having ATXPC syndrome the composition of any one of claims 22-25.

28. Use of the composition of any one of claims 23-25 for inactivating a mutant SAMD9L allele in a cell, comprising delivering to the cell the composition of any one of claims 23-25.

29. A medicament comprising the composition of any one of claims 23-25 for use in inactivating a mutant SAMD9L allele in a cell, wherein the medicament is administered by delivering to the cell the composition of any one of claims 23-25.

30. Use of the composition of any one of claims 23-25 for treating ameliorating or preventing ATXPC syndrome, comprising delivering to a cell of a subject having or at risk of having ATXPC syndrome the composition of any one of claims 23-25.

31. A medicament comprising the composition of any one of claims 23-25 for use in treating ameliorating or preventing ATXPC syndrome, wherein the medicament is administered by delivering to a cell of a subject having or at risk of having ATXPC syndrome the composition of any one of claims 23-25.
